(19) United States
(12) Patent Application Publication
(10) Pub. No.: US 2019/0144922 A1
(43) Pub. Date: May 16, 2019

(54) USING THE FULL REPERTOIRE OF GENETIC INFORMATION FROM BACTERIAL GENOMES AND PLASMIDS FOR IMPROVED GENETIC RESISTANCE TESTS

(71) Applicant: Ares Genetics GmbH, Vienna (AT)

(72) Inventors: Valentina Galata, Saarbrucken (DE); Andreas Keller, Puttlingen (DE); Holger Quast, Berlin (DE); Susanne Schmolke, Erlangen (DE)

(21) Appl. No.: 16/093,396

(22) PCT Filed: Apr. 12, 2017
(86) PCT No.: PCT/EP2017/058866

§ 371 Date: Oct. 12, 2018

(30) Foreign Application Priority Data
Apr. 14, 2016 (EP) 16165319.1

(51) Int. Cl. C12Q 1/689; G16H 50/20; G16B 20/00

(52) U.S. Cl. CPC C12Q 1/689; G16H 50/20; C12Q 2600/158; C12Q 2600/106; C12Q 2600/156; G16B 20/00

(57) ABSTRACT

Using the full repertoire of genetic information from bacterial genomes and plasmids for improved genetic resistance tests

The invention relates to a method of determining an antimicrobial drug resistance profile for a microorganism, wherein nucleic acid sequences of the microorganism are analyzed for at least two genetic variations of the nucleic acid sequences comprising at least one genetic variation in a chromosome and at least one genetic variation in at least one plasmid, as well as a, e.g. diagnostic, method of determining an infection of a patient with a microorganism potentially resistant to antimicrobial drug treatment and a method of selecting a treatment of a patient suffering from an infection with a potentially resistant microorganism, wherein the data of the antimicrobial drug resistance profile are applied.

[0001] Using the full repertoire of genetic information from bacterial genomes and plasmids for improved genetic resistance tests

[0002] The present invention relates to a method of determining an antimicrobial drug resistance profile for a microorganism, wherein nucleic acid sequences of the microorganism are analyzed for at least two genetic variations of the nucleic acid sequences comprising at least one genetic variation in a chromosome and at least one genetic variation in at least one plasmid, as well as a, e.g. diagnostic, method of determining an infection of a patient with a microorganism potentially resistant to antimicrobial drug treatment and a method of selecting a treatment of a patient suffering from an infection with a potentially resistant microorganism, wherein the data of the antimicrobial drug resistance profile are applied.

[0003] Antibiotic resistance is a form of drug resistance whereby a sub-population of a microorganism, e.g. a strain of a bacterial species, can survive and multiply despite exposure to an antibiotic drug. It is a serious health concern for the individual patient as well as a major public health issue. Timely treatment of a bacterial infection requires the analysis of clinical isolates obtained from patients with regard to antibiotic resistance, in order to select an efficacious therapy. Generally, for this purpose an association of the identified resistance with a certain microorganism (i.e. ID) is necessary.

[0004] Antibacterial drug resistance (ADR) represents a major health burden. The presence and genesis of bacterial resistance against active agents is more rapidly gaining importance as assumed. The increased usage of available drugs leads to multi-resistant bacteria, which in turn need even harder medical treatment. According to the World Health Organization's antimicrobial resistance global report on surveillance, ADR leads to 25,000 deaths per year in Europe and 23,000 deaths per year in the US. In Europe, 2.5 million extra hospital days lead to societal cost of 1.5 billion euro. In the US, the direct cost of 2 million illnesses leads to 20 billion dollar direct cost. The overall cost is estimated to be substantially higher, reducing the gross domestic product (GDP) by up to 1.6%.

[0005] In general the mechanisms for resistance of bacteria against antimicrobial treatments rely to a very substantial part on the organism's genetics. The respective genes or molecular mechanisms are either encoded in the genome of the bacteria or on plasmids that can be interchanged between different bacteria. The most common resistance mechanisms include:

[0006] 1) Efflux pumps are high-affinity reverse transport systems located in the membrane that transports the antibiotic out of the cell, e.g. resistance to tetracycline.

[0007] 2) Specific enzymes modify the antibiotic in a way that it loses its activity. In the case of streptomycin, the antibiotic is chemically modified so that it will no longer bind to the ribosome to block protein synthesis.

[0008] 3) An enzyme is produced that degrades the antibiotic, thereby inactivating it. For example, the penicillinases are a group of beta-lactamase enzymes that cleave the beta lactam ring of the penicillin molecule.

[0009] In addition, some pathogens show natural resistance against drugs. For example, an organism can lack a transport system for an antibiotic or the target of the antibiotic molecule is not present in the organism.

[0010] Pathogens that are in principle susceptible to drugs can become resistant by modification of existing genetic material (e.g. spontaneous mutations for antibiotic resistance, happening in a frequency of one in about 100 mio bacteria in an infection) or the acquisition of new genetic material from another source. One example is horizontal gene transfer, a process where genetic material contained in small packets of DNA can be transferred between individual bacteria of the same species or even between different species. Horizontal gene transfer may happen by transduction, transformation or conjugation. Usually, the expression of resistance imparting markers is induced only by presence of a drug.

[0011] Generally, testing for susceptibility/resistance to antimicrobial agents is performed by culturing organisms in different concentrations of these agents.

[0012] In brief, agar plates are inoculated with patient sample (e.g. urine, sputum, blood, stool) overnight. On the next day individual colonies are used for identification of organisms, either by culturing or using mass spectroscopy. Based on the identity of organisms new plates containing increasing concentration of drugs used for the treatment of these organisms are inoculated and grown for additional 12-24 hours. The lowest drug concentration which inhibits growth (minimal inhibitory concentration—MIC) is used to determine susceptibility/resistance for tested drugs. The process takes at least 2 to 3 working days during which the patient is treated empirically. Automated systems exist from several companies, e.g. Biomeriux (Vitek), Beckman Coulter (Microscan). A significant reduction of time-to-result is needed especially in patients with life-threatening disease and to overcome the widespread misuse of antibiotics.

[0013] More recent approaches focus on the genetic constitution of the pathogen and span the whole spectrum from low-plex testing for single resistance markers over small dedicated panels and target enriched sequencing to whole genome sequencing of bacteria. These approaches have demonstrated significant potential to revolutionize care of patients with infectious diseases.

[0014] Recent developments include PCR based test kits for fast bacterial identification (e.g. Biomerieux Biofire Tests, Curetis Unyvero Tests). With these test the detection of selected resistance loci is possible for a very limited number of drugs, but no correlation to culture based AST is given. Mass spectroscopy is increasingly used for identification of pathogens in clinical samples (e.g. Bruker Biotyper), and research is ongoing to establish methods for the detection of susceptibility/resistance against antibiotics.

[0015] The use of molecular techniques for direct detection of MRSA has become more commonplace especially for screening purposes. Resistance to methicillin is mediated via the mec operon which is part of the staphylococcal cassette chromosome mec (SCCmec). Recently PCR tests were introduced that are based on the detection of the right extremity sequence of the SCCmec in combination with S. aureus specific marker. Initial reports exist that describe culture based susceptibility reports despite detection of the presence of a resistance conferring gene.

[0016] It is known that drug resistance can be associated with genetic modifications such as polymorphisms or gene duplications/deletions. This holds for viruses, where resistance testing is established clinical practice (e.g. HIV genotyping). More recently, it has been shown that resistance has also genetic causes in bacteria and even higher organisms, such as humans where tumors resistance against certain cytostatic agents can be linked to genomic mutations.

[0017] Wozniak et al. (BMC Genomics 2012, 13(Suppl 7):S23) disclose genetic determinants of drug resistance in Staphylococcus aureus based on genotype and phenotype data. Stoesser et al. disclose prediction of antimicrobial susceptibilities for Escherichia coli and Klebsiella pneumoniae isolates using whole genomic sequence data (J Antimicrob Chemother 2013; 68: 2234-2244).

[0018] Chewapreecha et al (Chewapreecha et al (2014) Comprehensive Identification of single nucleotide polymorphisms associated with beta-lactam resistance within pneumococcal mosaic genes. PLoS Genet 10(8): e1004547) used a comparable approach to identify mutations in gram-positive Streptococcus Pneumonia.

[0019] However, there is a need for improved detection of infections with antimicrobial drug resistant microorganisms, particularly microbial species, and an improved prediction of response to anti-microbial therapy represents still a high unmet clinical need.

### SUMMARY OF THE INVENTION

[0020] While other approaches of the state of the art focus usually on point mutations, earlier findings showed that improved performance of prediction of resistance can be gained in two ways:

[0021] a) machine learning approaches can be used to combine the predictive power of single point mutations. These weak learners were located on the bacterial chromosome.

[0022] b) for some drugs point mutations did not yield a high predictive power. Thus we added larger structural variants, such as genes that were present or absent to improve the classification accuracy.

[0023] Besides the chromosomes, genetic resistance information can be also encoded on plasmids of bacteria. These are e.g. exchanged between different strains using horizontal gene transfer. The inventors thus extended the previous analyses that were centered on chromosomal genes and first defined pan-genomes. These contain the full genetic set, from the chromosome and the plasmids. In a first pass point a) described above was reinforced. By using more genetic variants generally a better performance was reached.

[0024] As a result of the analysis, the inventors found out that a combination of detection of at least two genetic variations of the nucleic acid sequences comprising at least one genetic variation in a chromosome and at least one genetic variation in at least one plasmid can improve the diagnosis of resistant/susceptible microorganisms, particularly bacterial microorganisms, to antimicrobial, e.g. antibiotic, drugs.

[0025] According to a first aspect the present invention relates to a method of determining an antimicrobial drug resistance profile for a microorganism, comprising:
[0026] obtaining or providing a first data set of nucleic acid sequences of a plurality of clinical isolates of the microorganism, wherein at least a part of the nucleic acid sequences of the first data set are assembled; and/or obtaining or providing a first data set of nucleic acid sequences of a plurality of clinical isolates of the microorganism and aligning the nucleic acid sequences of the first data set to at least one reference sequence;
[0027] analyzing the nucleic acid sequences of the first data set for at least two genetic variations of the nucleic acid sequences comprising at least one genetic variation in a chromosome and at least one genetic variation in at least one plasmid to obtain a third data set of structural variants;
[0028] providing a second data set of antimicrobial drug, e.g. antibiotic, resistance and/or susceptibility of the plurality of clinical isolates of the microorganism;
[0029] correlating the third data set with the second data set and statistically analyzing the correlation; and
[0030] determining the genetic variations in the nucleic acid sequences of the microorganism associated with antimicrobial drug, e.g. antibiotic, resistance.

[0031] Furthermore discloses is—in a second aspect—a, e.g. diagnostic, method of determining an infection of a patient with an antimicrobial drug resistant microorganism, comprising the steps of:

[0032] a) obtaining or providing a sample containing or suspected of containing a microorganism from the patient;

[0033] b) determining the presence of at least two genetic variations of the nucleic acid sequences comprising at least one genetic variation in the chromosome and at least one genetic variation in at least one plasmid, as determined by the method of the first aspect, wherein the presence of said at least two genetic variations of the nucleic acid sequences comprising at least one genetic variation in the chromosome and at least one genetic variation in at least one plasmid is indicative of an infection with an antimicrobial drug resistant microorganism in said patient.

[0034] In addition, a method of selecting a treatment of a patient suffering from an infection with a potentially antimicrobial drug resistant microorganism is disclosed in a third aspect, comprising the steps of:

[0035] a) obtaining or providing a sample containing or suspected of containing a microorganism from the patient;

[0036] b) determining the presence of at least two genetic variations of the nucleic acid sequences comprising at least one genetic variation in the chromosome and at least one genetic variation in at least one plasmid, as determined by the method of the first aspect, wherein the presence of said at least two genetic variations of the nucleic acid sequences comprising at least one genetic variation in the chromosome and at least one genetic variation in at least one plasmid is indicative of a resistance to one or more antimicrobial drugs;

[0037] c) identifying said at least one or more antimicrobial drugs; and

[0038] d) selecting one or more antimicrobial drugs different from the ones identified in step c) and being suitable for the treatment of the infection with the microorganism.

[0039] In a further aspect the present invention is directed to a computer program product comprising computer executable instructions which, when executed, perform a method according to either of the first, second and third aspect.

[0040] Even further aspects and embodiments of the invention are disclosed in the dependent claims and can be taken from the following description and examples, without being limited thereto.

### DETAILED DESCRIPTION OF THE INVENTION

### Definitions

[0041] Unless defined otherwise, technical and scientific terms used herein have the same meaning as commonly understood by one of ordinary skill in the art to which this invention belongs.

[0042] Susceptibility herein means that isolates are inhibited by a certain concentration of an antimicrobial agent, whereas resistance means that isolates are not inhibited

[0043] An “antimicrobial drug” in the present invention refers to a group of drugs that includes antibiotics, antifungals, antiprotozoals, and antivirals. According to certain embodiments, the antimicrobial drug is an antibiotic.

[0044] The term “nucleic acid molecule” refers to a macromolecule comprising nucleotides, particularly a polynucleotide molecule having a defined sequence. It comprises DNA molecules, RNA molecules, nucleotide analog molecules and combinations and derivatives thereof, such as DNA molecules or RNA molecules with incorporated nucleotide analogs or cDNA.

[0045] The term “nucleic acid sequence information” relates to information which can be derived from the sequence of a nucleic acid molecule, i.e. the nucleic acid sequence, such as the sequence itself or a variation in the sequence as compared to a reference sequence. A genetic sequence can thereby encompass coding as well as non-coding parts. The whole genetic material of a microorganism thereby makes up the genome.

[0046] The term “genetic variation”, which also can be termed “mutation”, relates to a variation in the sequence as compared to a reference sequence or multiple reference sequences. Such a reference sequence can be e.g. determined in a predominant wild type organism or another reference organism, e.g. a defined and known bacterial strain or substrain. A mutation is for example a deletion of one or multiple nucleotides, an insertion of one or multiple nucleotides, or substitution of one or multiple nucleotides, duplication of one or a sequence of multiple nucleotides, translocation of one or a sequence of multiple nucleotides, e.g. also a single nucleotide polymorphism (SNP). The term “single nucleotide polymorphism” (SNP) is thereby synonymous to the term “single nucleotide variant” (SNV), and both refer to the same.

[0047] In the context of the present invention a “sample” is a sample which comprises at least one nucleic acid molecule from a bacterial microorganism. Examples for samples are: cells, tissue, biopsy specimens, body fluids such as blood, urine, saliva, sputum, plasma, serum, cell culture supernatant, swab sample and others. According to certain embodiments, the sample is a patient sample (clinical isolate).

[0048] New and highly efficient methods of sequencing nucleic acids referred to as next generation sequencing have opened the possibility of large scale genomic analysis. The term “next generation sequencing” or “high throughput sequencing” refers to methods achieving a higher throughput in sequencing, e.g. high-throughput sequencing technologies that parallelize the sequencing process, producing thousands or millions of sequences at once, or methods producing longer reads and are read out faster. Examples include Massively Parallel Signature Sequencing (MPSS), Polony sequencing, 454 pyrosequencing, Illumina (Solexa) sequencing, SOLID sequencing, Ion semiconductor sequencing, DNA nanoball sequencing, Helioscope™ single molecule sequencing, Single Molecule SMRT™ sequencing, Single Molecule real time (RNAP) sequencing, Nanopore DNA sequencing, Sequencing By Hybridization, Amplicon Sequencing, GnuBio.

[0049] Within the present description the term “microorganism” comprises the term microbe. The type of microorganism is not particularly restricted, unless noted otherwise or obvious, and, for example, comprises bacteria, viruses, fungi, microscopic algae and protozoa, as well as combinations thereof. According to certain aspects, it refers to one or more bacterial species, being either Gram-negative or Gram-positive, e.g. one or more of Acinetobacter, e.g. Acinetobacter baumannii, Escherichia, e.g. E. coli, Enterobacter, Klebsiella, e.g. Klebsiella oxytoca and/or Klebsiella pneumoniae, Proteus, e.g. Proteus mirabilis, Pseudomonas, Salmonella, Serratia, e.g. Serratia marcescens, Shigella and/or Staphylococcus species.

[0050] A reference to a microorganism or microorganisms in the present description comprises a reference to one microorganism as well a plurality of microorganisms, e.g. two, three, four, five, six or more microorganisms.

[0051] A vertebrate within the present invention refers to animals having a vertebrae, which includes mammals—including humans, birds, reptiles, amphibians and fishes. The present invention thus is not only suitable for human medicine, but also for veterinary medicine.

[0052] According to certain embodiments, the patient in the present methods is a vertebrate, more preferably a mammal and most preferred a human patient.

[0053] Before the invention is described in exemplary detail, it is to be understood that this invention is not limited to the particular component parts of the process steps of the methods described herein as such methods may vary. It is also to be understood that the terminology used herein is for purposes of describing particular embodiments only, and is not intended to be limiting. It must be noted that, as used in the specification and the appended claims, the singular forms “a,” “an” and “the” include singular and/or plural referents unless the context clearly dictates otherwise. For example, the term “a” as used herein can be understood as one single entity or in the meaning of “one or more” entities. It is also to be understood that plural forms include singular and/or plural referents unless the context clearly dictates otherwise. It is moreover to be understood that, in case parameter ranges are given which are delimited by numeric values, the ranges are deemed to include these limitation values.

[0054] Regarding the dosage of the antimicrobial, e.g. antibiotic, drugs, it is referred to the established principles of pharmacology in human and veterinary medicine. For example, Forth, Henschler, Rummel “Allgemeine und spezielle Pharmakologie und Toxikologie”, 9th edition, 2005, pp. 781-919 might be used as a guideline. Regarding the formulation of a ready-to-use medicament, reference is made to “Remington, The Science and Practice of Pharmacy”, 22^{nd} edition, 2013, pp. 777-1070.

[0055] Assembling of a nucleic acid, e.g. gene, sequence can be carried out by any known method and is not particularly limited.

[0056] According to certain embodiments, mutations, respectively genetic variations, that were found using alignments can also be compared or matched with alignment-free methods, e.g. for detecting single base exchanges, for example based on contigs that were found by assemblies. For example, reads obtained from sequencing can be assembled to contigs and the contigs can be compared to each other.

[0057] In the description, the term “structural variations” is used equivalently to the term “structural changes”, and both refer to the same phenomenon within the scope of this invention.

[0058] A structural variation comprising a change in the nucleic acid sequence comprising more than one base refers to a structural variation wherein at least two bases, preferably at least four bases, in a nucleic acid sequence of a microorganism that are adjacent are changed, and can refer to e.g. a deletion of multiple (2, e.g. 4, or more) nucleotides, an insertion of multiple (2, e.g. 4, or more) nucleotides, a substitution of multiple (2, e.g. 4, or more) nucleotides, a duplication of a sequence of multiple (2, e.g. 4, or more) nucleotides, or a translocation of a sequence of multiple (2, e.g. 4, or more) nucleotides. According to certain embodiments, a structural variation affects a sequence length of at least about 50 bases, preferably at least about 100 bases, further preferably at least about 1 Kb (=1000 bases). According to certain embodiments, a structural variation affects a sequence length of at most 300 Mb (Mega base=1000000 bases), e.g. of at most 30 Mb, e.g. of at most 3 Mb. In case the term “structural variation refers to a change in the nucleic acid sequence of 4 or more bases, e.g. at least about 50 bases, preferably at least about 100 bases, further preferably at least about 1 Kb, the term single nucleotide polymorphism can be understood to include also small indels (insertions or deletions) of up to at most 3 bases, e.g. up to two bases. According to certain embodiments, a structural variation can comprise bigger parts sections of the nucleic acid sequence, e.g. at least one whole gene in the nucleic acid sequence of the microorganism, or even more genes in an open reading frame. According to certain embodiments, structural variations refer to inclusion of repetitive elements, copy number variations (gains and losses of single genes or larger parts of chromosomes), gene fusions, translocations and other more rare events. According to certain embodiments, at least one inclusion of repetitive elements, one copy number variation (gains and losses of single genes or larger parts of chromosomes), one gene fusion, and/or translocation of single genes or larger parts of chromosomes is observed in the present methods as a structural variation. Structural variations can e.g. include inclusion of repetitive elements, copy number variations (gains and losses of single genes or larger parts of chromosomes), gene fusions, translocations, inclusion/addition of new genes, and other more rare events.

[0059] A single nucleotide polymorphism (SNP) refers within the scope of the invention to a variation in a single nucleotide within a nucleic acid sequence, which can result from e.g. an addition, deletion, substitution, insertion or translocation of a single nucleotide.

[0060] In the present invention, a reference sequence is not particularly limited, as long as it is useful as a reference for one or more unknown nucleic acid sequences in one or more samples. It can, for example, be one or more reference nucleic acid sequences, e.g. reference genomes, a pan-genome or one or more centroids. A pan-genome, also referred to as supra-genome, can describe the full complement of genes in a clade, e.g. a certain species in bacteria, which can vary among related strains. According to certain embodiments, the reference sequences comprise one or more centroids, wherein a centroid is a representative of a gene group/family/cluster of a genome, e.g. of a microorganism. Centroids can be for example extracted from the database MetaRef (http://metaref.org/). After the extraction the data from the MetaRef database can be updated continually for further experiments. A list of centroids can be extracted for each organism separately or as a whole. The centroid information, e.g. for annotation, can be extracted from databases like IMG (http://img.jgi.doe.gov/), as in the present case, or NCBI. According to certain embodiments, alignment is carried out using a pan-genome.

[0061] According to a first aspect, the present invention relates to a method of determining an antimicrobial drug resistance profile for a microorganism, comprising:
[0062] obtaining or providing a first data set of nucleic acid sequences of a plurality of clinical isolates of the microorganism, wherein at least a part of the nucleic acid sequences of the first data set are assembled; and/or obtaining or providing a first data set of nucleic acid sequences of a plurality of clinical isolates of the microorganism and aligning the nucleic acid sequences of the first data set to at least one reference sequence;
[0063] analyzing the nucleic acid sequences of the first data set for at least two genetic variations of the nucleic acid sequences comprising at least one genetic variation in a chromosome and at least one genetic variation in at least one plasmid to obtain a third data set of structural variants;
[0064] providing a second data set of antimicrobial drug, e.g. antibiotic, resistance and/or susceptibility of the plurality of clinical isolates of the microorganism;
[0065] correlating the third data set with the second data set and statistically analyzing the correlation; and
[0066] determining the genetic variations in the nucleic acid sequences of the microorganism associated with antimicrobial drug, e.g. antibiotic, resistance.

[0067] In this method, as well as the other methods of the invention, the first data set of nucleic acid, e.g. gene, but also non-coding, sequences of a plurality of clinical isolates can be provided or obtained in any way, preferably non-invasive, and can be e.g. provided from in vitro samples.

[0068] In the present methods, at least two genetic variations of the nucleic acid sequences comprising at least one genetic variation in a chromosome and at least one genetic variation in at least one plasmid are determined, leading to improved results compared to determining at least two genetic variations in only chromosomal nucleic acid sequences or only in plasmid nucleic acid sequences.

[0069] In the present methods, at least two genetic variations of the nucleic acid sequences comprising at least one genetic variation in a chromosome and at least one genetic variation in at least one plasmid are determined, i.e. at least a genetic variation in a chromosome of the microorganism and at least a genetic variation in at least one plasmid. A plasmid is thereby a small nucleic acid molecule within a cell, e.g. in a microorganism, that is physically separated from chromosomal nucleic acid. According to certain aspects, more than one, e.g. two, three, four, five, six, seven, eight, nine, ten, eleven, twelve, or more, genetic variations in a chromosome and/or more than more than one, e.g. two, three, four, five, six, seven, eight, nine, ten, eleven, twelve, or more, genetic variation in at least one plasmid are determined. The genetic variation(s) in the plasmid can be determined in one plasmid or more than one plasmid, e.g. two, three, four, five, six, seven, eight, nine, ten, or more plasmids. According to certain embodiments, the correlation and statistical analysis can even encompass a technique wherein all genetic variations in the chromosomal and plasmid nucleic acid sequences are taken into account and then optimized for obtaining the genetic variations in the nucleic acid sequences of the microorganism associated with antimicrobial drug, e.g. antibiotic, resistance which have improved statistical relevance, e.g. can obtain a higher probability to be association with antimicrobial drug, e.g. antibiotic, resistance. According to certain embodiments, a statistical analysis can be carried out using a classification approach/method like a decision tree, random forest, neural network, bayesian classification, support vector machine, etc. wherein at first the presence of a single nucleotide polymorphism and/or structural variation is determined, e.g. a decision tree, wherein in the decision tree at first the presence of a single nucleotide polymorphism and/or structural variation is determined. A classification approach can be suitably selected and applied, e.g. a decision tree can be generated using known methods, e.g. within the scope of the statistical analysis, and is otherwise not particularly restricted. According to certain embodiments, a resistance in the microorganism can be determined using a decision tree, corresponding to a statistical analysis.

[0070] According to certain embodiments, the obtaining or providing of nucleic acid, e.g. gene, but also e.g. non-coding, sequences of a plurality of clinical isolates in this method—as well as the other methods of the invention—can comprise the following:

[0071] A sample of a vertebrate, e.g. a human, e.g. is provided or obtained and nucleic acid sequences, e.g. DNA or RNA sequences, are recorded by a known method for recording nucleic acid, which is not particularly limited. For example, nucleic acid can be recorded by a sequencing method, wherein any sequencing method is appropriate, particularly sequencing methods wherein a multitude of sample components, as e.g. in a blood sample, can be analyzed for nucleic acids and/or nucleic acid fragments and/or parts thereof contained therein in a short period of time, including the nucleic acids and/or nucleic acid fragments and/or parts thereof of at least one microorganism of interest, particularly a bacterial microorganism. For example, sequencing can be carried out using polymerase chain reaction (PCR), particularly multiplex PCR, or high throughput sequencing or next generation sequencing, preferably using high-throughput sequencing. For sequencing, preferably an in vitro sample is used.

[0072] The obtaining or providing of nucleic acid sequences thereby included obtaining or providing chromosomal nucleic acid sequences as well as plasmid nucleic acid sequences, particularly the whole nucleic acid sequences of the microorganism, e.g. bacterial microorganism.

[0073] The data obtained by the sequencing can be in any format, and can then be used to identify the nucleic acids of the microorganism to be identified, by known methods, e.g. fingerprinting methods, comparing nucleic acid sequences, e.g. genomes and/or aligning to at least one, or more, reference sequences (chromosomal and plasmid sequences) of one or more species of the microorganism of interest, e.g. a reference genome and/or centroids, etc., forming a third data set of, optionally aligned, nucleic acid sequences, e.g. genes, for a microorganism—discarding additional data from other sources, e.g. the vertebrate. For the present method, also the raw data can be used and/or assemblies, at least in part, can be used for forming the third data set. Thus, according to certain embodiments, at least a part of the nucleic acid, e.g. gene, sequences of the first data set can be assembled, wherein assembly can be carried out by any known method and is not particularly limited. In addition, also data from reference sequences, e.g. centroids and/or genomes of known species, e.g. from bacterial species that are already known, e.g. using databases like MetaRef—which can provide pangenomes—and/or at the NCBI, can be used in the first data set and/or for evaluation of the first data set. For constructing pan-genomes, also assembled data can be used, e.g. nucleic acid sequence data obtained by sequencing of samples can be assembled and then calculated, e.g. using Roary (Rapid large-scale prokaryote pan genome analysis (Bioinformatics 2015 Nov. 15; 31(22): 3691-3. doi:

[0074] 10.1093/bioinformatics/btv421. Epub 2015 Jul. 20. Page AJ, Cummins C A, et al.).

[0075] Pan-genomes can thereby offer the advantage that they contain chromosomal nucleic acid sequences as well as plasmid nucleic acid sequences, i.e. a comparison to the pan-genome enables a fast and complete analysis of the first data set for genetic variations. Further, a pan-genome also allows for a more complete analysis for genetic variations as the pan-genome also allows for variation in gene content among closely related strains.

[0076] For some organisms, it might be useful in genome-wide association studies to reference the points of interest, e.g. structural variations and/or SNPs, to one constant reference for enhanced standardization. In case of the human with a high consistency of the genome and 99% identical sequences among individuals this is easy and represents the standard, as corresponding reference genomes are available in databases.

[0077] In case of organisms that trigger infectious diseases (e.g. bacteria and viruses) this is much more difficult, though, and particularly also genetic variations like structural variations and/or SNPs that are not on genes, particularly known genes, can be missed when aligning sequence data to a reference nucleic acid sequence, e.g. a reference genome. One possibility to overcome this is to fall back on a virtual pangenome which contains all sequences of a certain genus or to perform reference free variation calling. A further possibility is the analysis of a huge amount of reference sequences, e.g. using MetaRef, and even all available references, which is much more complex. Therein all n references from a database (e.g. RefSeq) are extracted and compared with the newly sequenced bacterial nucleic acid sequences, e.g. genomes, k. After this, matrices (% of mapped reads, % of covered nucleic acid sequence, e.g. genome) can be applied and the data can be compared to several reference sequences. In such a case, n×k complete alignments are carried out. Having a big number of references, stable results can be obtained.

[0078] In the present method, nucleic acid, e.g. gene, but also noncoding, sequence of the first data set can also be assembled, at least in part, according to certain embodiments with known methods, e.g. by de-novo assembly or mapping assembly, reference guided assembly. The sequence assembly is not particularly limited, and any known nucleic acid sequence assembler can be used, e.g. based on Sanger, 454, Solexa, Illumina, SOLid technologies, etc., as well as hybrids/mixtures thereof.

[0079] According to certain embodiments, the data of nucleic acids of different origin than the microorganism of interest, e.g. a bacterial microorganism, can be removed after the nucleic acids of interest are identified, e.g. by filtering the data out. Such data can e.g. include nucleic acids of a patient, e.g. the vertebrate, e.g. human, and/or other microorganisms, etc. This can be done by e.g. computational subtraction, as developed by Meyerson et al. 2002. For this, also aligning to the nucleic acid sequences, e.g. genome, of the vertebrate, etc., is possible. For aligning, several alignment-tools are available. This way the original data amount from the sample can be drastically reduced.

[0080] After such removal of “excess” data, obtaining the third data set can be carried out for the microorganism, e.g. a bacterial microorganism, as described above and below.

[0081] Using these techniques, structural variations and SNPs in the nucleic acid sequences, e.g. in the gene sequences, of the microorganism of interest, e.g. a bacterial microorganism, can be obtained for various species, including chromosomal nucleic acid sequences as well as plasmid nucleic acid sequences.

[0082] When testing these same species for antimicrobial drug, e.g. antibiotic, susceptibility of a number of antimicrobial drugs, e.g. antibiotics, e.g. using standard culturing methods on dishes with antimicrobial drug, e.g. antibiotic, intake, as e.g. described below, the results of these antimicrobial drug, e.g. antibiotic, susceptibility tests can then be cross-referenced/correlated with the structural variations in the nucleic acid sequences of the respective microorganism. Using several, e.g. 50 or more than 50, 100 or more than 100, 200 or more than 200, 400 or more than 400, 500 or more than 500, 800 or more than 800, 900 or more than 900, 1000 or more than 1000, or 1100 or more than 1100 different isolates of the same or different species of a microorganism, statistical analysis can be carried out on the obtained cross-referenced data between genetic variations and antimicrobial drug, e.g. antibiotic, susceptibility for these microorganisms, using known methods.

[0083] Regarding culturing methods, which are nor limited, samples of microorganisms can be e.g. cultured overnight. On the next day individual colonies can be used for identification of organisms, either by culturing or using mass spectroscopy.

[0084] Based on the identity of organisms new plates containing increasing concentration of antibiotics used for the treatment of these organisms are inoculated and grown for additional 12-24 hours. The lowest drug concentration which inhibits growth (minimal inhibitory concentration—MIC) can be used to determine susceptibility/resistance for tested antibiotics.

[0085] Also, resistance testing can be carried out by determining e.g. known resistance genes in the different isolates, like in case of methicillin resistant Staphylococcus aureus (MRSA) and methicillin susceptible Staphylococcus aureus (MSSA). For determining resistances, respectively susceptibility, the data from culturing methods and/or from determining known resistance genes, as well as data obtained in different ways, e.g. based on mass spectrometry (possibly also in connection with culturing) can be used.

[0086] Correlation of the genetic variations with antimicrobial drug, e.g. antibiotic, resistance can be carried out in a usual way and is not particularly limited. For example, resistances can be correlated to structural variations and/or SNPs in the whole nucleic acid sequence(s) of the respective microorganism or only parts thereof, for example only coding parts of the nucleic acid sequence(s). In some cases even only genetic variations, i.e. structural variations and/or SNPS in nucleic acid molecules with certain nucleic acid sequences, e.g. genes, e.g. certain genes, or certain mutations in nucleic acid molecules with certain nucleic acid sequences, e.g. genes, can be determined. After correlation, statistical analysis can be carried out. The correlation is carried out with both chromosomal nucleic acid sequences and plasmid nucleic acid sequences.

[0087] According to certain embodiments, the data of the first data set, particularly genetic variations, particularly structural variations and/or SNPs, can be filtered prior to a possible annotation to a pan-genome and/or reference genome(s) and the correlation with the resistance/susceptibility data, e.g. when determining structural variations.

[0088] For example, to reduce the number of similar annotations for genetic variations, e.g. for structural variations and/or SNPs, they can be filtered and aggregated by one or more of the following:
[0089] Only annotations for which the considered genetic variation, e.g. structural variation and/or SNP, lies on a protein can be kept and the further data discarded
[0090] Only annotations which do not contain “hypothetical proteins” can be kept
[0091] Annotations can be sorted by identification number (ID) for genetic variations, e.g. for SNPs and/or structural variation, and nucleic acid sequence, e.g. gene product
[0092] For a unique pair of IDs and nucleic acid sequences, e.g. gene products, only the first annotation can be kept, e.g. in case of multiple nucleic acid sequences, e.g. coding certain genes, in a genome

[0093] Also, according to certain embodiments, the following genetic variations, e.g. structural variations and/or SNPs, can be excluded:

[0094] 1. Constant features and phenotypes (same value or only NA (not applicable)) can be removed (e.g. centroids present in all samples or phenotypes with the result “resistant” for all samples)

[0095] 2. Almost constant features and phenotypes can also be removed, e.g. features whose most frequent value was in >=95% of all samples, ignoring NA values, can be removed (e.g. a centroid is present in >=95% of all samples)
[0096] Also phenotypes whose most frequent value was in >=90% of all samples, ignoring NA values, can be removed (e.g. >=90% of all samples are resistant)

[0097] 3. In addition, only drugs with non-missing data for at least 10% of the samples can be kept.

[0098] 4. Genetic variations, e.g. SNPs and/or structural variations, without any annotation or mutations, e.g. SNPs and/or structural variations whose all annotations contain flag “synonymous”, can be removed so that only mutations, e.g. SNPs and/or structural variations, with at least one non-synonymous annotation, e.g. a non-synonymous coding, are considered

[0099] Statistical analysis is not particularly limited and can be suitably carried out. Statistical analysis of the correlation of the genetic, e.g. gene, variations with antimicrobial drug, e.g. antibiotic, resistance is not particularly limited and can be carried out, depending on e.g. the amount of data, in different ways, for example using analysis of variance (ANOVA), Student's t-test or Fisher's exact test, for example with a sample size n of 50, 100, 200, 300, 400, 500, 600, 800, 1000 or 1100, and a level of significance (α-error-level) of e.g. 0.05 or smaller, e.g. 0.05, preferably 0.01 or smaller. According to certain embodiments, statistical analysis in the present methods can be carried out using Fisher's test—or a similar test—with p<10⁻³, preferably p<10⁻⁶, further preferably p<10⁻⁹. A statistical value can be obtained for each genetic variation, e.g. structural variation and/or SNP, for each nucleic acid/genetic sequence in the nucleic acid sequences, i.e. the chromosomal and plasmid nucleic acid sequences, as well as for all antibiotics tested, a group of antibiotics or a single antibiotic. The obtained p-values can also be adapted for statistical errors, if needed.

[0100] For statistically sound results a multitude of individuals should be sampled, with n=50, 100, 200, 300, 400, 500, 600, 800, 1000, or 1100 or more and a level of significance (α-error-level) of e.g. 0.05 or smaller, e.g. 0.05, preferably 0.01 or smaller. According to certain embodiments, particularly significant results can be obtained for n=200, 300, 400, 500, 600 or more.

[0101] For statistically sound results a multitude of individuals should be sampled, with n=50 or more, 100 or more, 200 or more, 300 or more, 400 or more, 500 or more, 600 or more, 800 or more, 1000 or more, or 1100 or more, and a level of significance (α-error-level) of e.g. 0.05 or smaller, e.g. 0.05, preferably 0.01 or smaller. According to certain embodiments, particularly significant results can be obtained for n=200 or more, 300 or more, 400 or more, 500 or more, 600 or more, 800 or more, 1000 or more, or 1100 or more.

[0102] For statistical analysis, e.g. Fisher's exact two-sided test can be applied with subsequent p-value adjustment over all phenotypes together using e.g. familywise error rate (FWER) or FDR (false discovery rate) and p-value threshold of 0.01 (corresponding to 10⁻², respectively 1e-2). Additionally, 10 permutation tests can be performed by permuting each phenotype separately and applying Fisher's exact test, e.g. to the centroid presence matrix and permuted phenotypes. Regarding centroids, the results then can be further filtered by centroid annotation, i.e.

1. Centroids without a gene product name can optionally be removed
2. Centroids whose gene product name contains “putative”, “predicted” or “hypothetical” can be removed
3. If there are centroids with same gene product name and gene symbol than only the first one can be kept
4. Centroids without GeneBank accession can be removed

[0103] Other statistical analysis can also be carried out alternatively or in addition, though.

[0104] According to certain embodiments, the genetic variations, e.g. structural variations and/or SNPs can be annotated to a pan-genome of the microorganism and/or annotated to one or more reference sequences, e.g. centroids, of the microorganism. The construction of a pan-genome is not particularly limited and can be done using known methods. For example, assembled data, e.g. of several, e.g. more than 100, more than 200, or more than 300, individual samples of the microorganism, can be used for constructing a pan-genome, e.g. nucleic acid sequence data obtained by sequencing of the samples can be assembled and then calculated, e.g. using Roary (Rapid large-scale prokaryote pan genome analysis (Bioinformatics 2015 Nov. 15; 31(22): 3691-3. doi:

[0105] 10.1093/bioinformatics/btv421. Epub 2015 Jul. 20. Page AJ, Cummins C A, et al.). According to certain embodiments, the genetic variations, e.g. structural variations and/or SNPs can be annotated to a pan-genome of the microorganism. However, other suitable reference genomes can be found at publicly available data bases like at the NCBI or from MetaRef.

[0106] When referring to the second data set, wherein the second data set e.g. comprises, respectively is, a set of antimicrobial drug, e.g. antibiotic, resistances of a plurality of clinical isolates, this can, within the scope of the invention, also refer to a self-learning data base that, whenever a new sample is analyzed, can take this sample into the second data set and thus expand its data base. The second data set thus does not have to be static and can be expanded, either by external input or by incorporating new data due to self-learning. This is, however, not restricted to the first aspect of the invention, but applies to other aspects of the invention that refer to a second data set, which does not necessarily have to refer to antimicrobial drug resistance. The same applies, where applicable, to the first data set, e.g. in the first aspect.

[0107] According to certain embodiments of the first aspect, the genetic variations, e.g. SNPs and/or structural variations, are detected alignment-free. According to certain embodiments, the genetic variations, e.g. SNPs and/or structural variations, are annotated to a pan-genome of the microorganism and/or annotated to one or more reference sequences.

[0108] The method of the first aspect of the present invention, as well as related methods, e.g. according to the 2^{nd} and 3^{rd} aspect, comprise correlating different genetic variations to each other. This way higher statistical significance can be achieved. Particularly, improved results are obtained by correlating genetic variations in chromosomal nucleic acid sequences and plasmid nucleic acid sequences.

[0109] According to certain embodiments of the method of the first aspect and related methods—as above, the second data set can be provided by culturing the clinical isolates of the microorganism on suitable plates, e.g. agar plates, provided with antimicrobial drugs, e.g. antibiotics, at different concentrations, and the second data can be obtained by taking the minimal concentration of the plates that inhibits growth of the respective microorganism.

[0110] According to certain embodiments the antimicrobial drug, e.g. antibiotic drug, is selected from the group consisting of β-lactams, β-lactam inhibitors, quinolones and derivatives thereof, e.g. fluoroquinolones, aminoglycosides, glycopeptides, lincosamides, macrolides, nitrofuranes, oxazolidinones, polyketides, respectively tetracyclines, and folate synthesis inhibitors, e.g. benzene derived/sulfonamide antibiotics. According to certain embodiments, the antimicrobial drug, e.g. antibiotic drug, is selected from the group consisting of Amoxicillin/K Clavulanate (AUG), Ampicillin (AM), Aztreonam (AZT), Cefazolin (CFZ), Cefepime (CPE), Cefotaxime (CFT), Ceftazidime (CAZ), Ceftriaxone (CAX), Cefuroxime (CRM), Cephalotin (CF), Ciprofloxacin (CP), Ertapenem (ETP), Gentamicin (GM), Imipenem (IMP), Levofloxacin (LVX), Meropenem (MER), Piperacillin/Tazobactam (P/T), Ampicillin/Sulbactam (A/S), Tetracycline (TE), Tobramycin (TO), and Trimethoprim/Sulfamethoxazole (T/S). According to certain embodiments, the microorganism is a Gram-positive or a Gram-negative bacteria, e.g. a Gram-negative bacteria.

[0111] In the methods of the invention, the resistance of the microorganism, particularly the bacterial microorganism, to one or more antimicrobial, e.g. antibiotic, drugs can be determined.

[0112] According to certain embodiments, the resistance of a microorganism, particularly bacterial microorganism, against 1, 2, 3, 4, 5, 6, 7, 8, 9, 10, 11, 12, 13, 14, 15 or 16, 17, 18, 19, 20, 21 or more antibiotic drugs is determined. According to certain embodiments, the resistance of a microorganism, particularly bacterial microorganism, against 1, 2, 3, 4, 5, 6, 7, 8, 9, 10, 11, 12, 13, 14, 15 or 16, 17, 18, 19, 20 or 21 antibiotic drugs is determined.

[0113] A second aspect of the present invention relates to a, e.g. diagnostic, method of determining an infection of a patient with an antimicrobial drug resistant microorganism, comprising the steps of:

a) obtaining or providing a sample containing or suspected of containing a microorganism from the patient;
b) determining the presence of at least two genetic variations of the nucleic acid sequences comprising at least one genetic variation in the chromosome and at least one genetic variation in at least one plasmid, as determined by the method of the first aspect, wherein the presence of said at least two genetic variations of the nucleic acid sequences comprising at least one genetic variation in the chromosome and at least one genetic variation in at least one plasmid is indicative of an infection with an antimicrobial drug resistant microorganism in said patient.

[0114] According to certain embodiments, the microorganism in step a) is a bacterial microorganism potentially resistant to antimicrobial drug treatment.

[0115] An infection of a patient with a microorganism, preferably a bacterial microorganism, e.g. one or more of Acinetobacter, Escherichia, e.g. E. coli, Enterobacter, Klebsiella, Proteus, Pseudomonas, Salmonella, Serratia, Shigella and/or Staphylococcus species, potentially resistant to antimicrobial drug treatment herein means an infection of a patient with a microorganism, preferably a bacterial microorganism, particularly one as noted above, wherein it is unclear if the microorganism, preferably bacterial microorganism, is susceptible to treatment with a specific antimicrobial drug or if it is resistant to the antimicrobial drug.

[0116] With this method, any genetic variations/mutations in the nucleic acid sequences of a microorganism, e.g. bacterial microorganism, e.g. a clinical isolate with an unknown strain of the microorganism, particularly bacterial microorganism, correlated with antimicrobial drug, e.g. antibiotic, resistance can be determined and a thorough antimicrobial drug, e.g. antibiotic, resistance profile can be established comprising structural variations as well as SNPs.

[0117] Again, the different steps can herein be carried out as described with regard to the first aspect of the present invention.

[0118] According to this aspect, an infection with a microorganism, particularly a bacterial microorganism, in a patient can be determined using sequencing methods of chromosomal and plasmid nucleic acid sequences, as well as a resistance to antimicrobial drugs, e.g. antibiotics, of the microorganism can be determined in a short amount of time compared to conventional methods, and a more thorough diagnostic is possible compared to a determination of only structural variations and/or SNPs in chromosomal nucleic acid sequences or only in plasmid nucleic acid sequences, leading to improved results for determining the resistance and/or susceptibility of the microorganism, particularly bacterial microorganism.

[0119] In a third aspect, the present invention relates to a method of selecting a treatment of a patient suffering from an infection with a potentially antimicrobial drug resistant microorganism, comprising the steps of:

a) obtaining or providing a sample containing or suspected of containing a microorganism from the patient;
b) determining the presence of at least two genetic variations of the nucleic acid sequences comprising at least one genetic variation in the chromosome and at least one genetic variation in at least one plasmid, as determined by the method of the first aspect, wherein the presence of said at least two genetic variations of the nucleic acid sequences comprising at least one genetic variation in the chromosome and at least one genetic variation in at least one plasmid is indicative of a resistance to one or more antimicrobial drugs;
c) identifying said at least one or more antimicrobial drugs; and
d) selecting one or more antimicrobial drugs different from the ones identified in step c) and being suitable for the treatment of the infection with the microorganism.

[0120] This method can be carried out similarly to the one in the second aspect of the invention and enables a fast way to select a suitable treatment with antibiotics for any infection with an unknown microorganism, particularly bacterial microorganism, with improved results compared to a determination of only structural variations and/or SNPs in chromosomal nucleic acid sequences or only in plasmid nucleic acid sequences.

[0121] In this method, as well as similar ones, no aligning is necessary, as the unknown sample can be directly correlated, after the nucleic acid sequences are produced, with the second data set, and thus genetic variations and antimicrobial drug, e.g. antibiotic, resistances can be determined. The first data set can be assembled, for example, using known techniques.

[0122] According to certain embodiments, statistical analysis in the present method is carried out using Fisher's test with p<10⁻³, preferably p<10⁻⁶, preferably p<10⁻⁹. Also, according to certain embodiments, the method further comprises correlating different genetic sites to each other.

[0123] According to certain aspects, genetic variations, e.g. structural variations and/or SNPs, in at least two, three, four, five, six, seven, eight, nine, ten, eleven, twelve, or more positions, respectively sequences, are determined in any of the methods of the present invention, e.g. in at least two positions, respectively sequences, or in at least three positions, respectively sequences, in the chromosomal nucleic acid sequences and/or the plasmid nucleic acid sequences. Instead of testing only single positions and/or sequences, the combination of several genetic variations, e.g. variant positions and/or sequences, can improve the prediction accuracy and further reduce false positive findings that are influenced by other factors. Therefore, it is in particular preferred to determine the presence of structural variations and/or SNPs in 2, 3, 4, 5, 6, 7, 8, 9, 10, 11, 12 (or more) sequences.

[0124] The identification of the at least one or more antimicrobial, e.g. antibiotic, drug in step c) is then based on the results obtained in step b) and corresponds to the antimicrobial, e.g. antibiotic, drug(s) that correlate(s) with the structural variations and SNPs. Once these antimicrobial drugs, e.g. antibiotics, are ruled out, the remaining antimicrobial drugs, e.g. antibiotic drugs/antibiotics, can be selected in step d) as being suitable for treatment.

[0125] According to certain embodiments in the second or third aspect, step b) is carried out using a classification approach/method like a decision tree, random forest, neural network, bayesian classification, support vector machine, etc. wherein at first the presence of a single nucleotide polymorphism and/or structural variation is determined, e.g. a decision tree, wherein in the decision tree at first the presence of a single nucleotide polymorphism and/or structural variation is determined. A classification approach can be suitably selected and applied, e.g. a decision tree can be generated using known methods, e.g. within the scope of the statistical analysis, and is otherwise not particularly restricted. According to certain embodiments, a resistance in the microorganism can be determined using a decision tree, corresponding to a statistical analysis. This way the diagnosis of a resistant microorganism, e.g. bacterial microorganism, can be optimized.

[0126] According to certain embodiments, determining the nucleic acid sequence information or the presence of a genetic variation in the present methods comprises using a next generation sequencing or high throughput sequencing method, e.g. as mentioned above.

[0127] According to certain embodiments in any of the aspects of the present invention, the microorganism is of genus Acinetobacter, particularly Acinetobacter baumannii, and the drug is chosen from CP, IMP, and/or LVX, and/or the microorganism is of genus Escherichia, particularly E. coli, and the drug is CRM, and/or the microorganism is of genus Klebsiella, particularly Klebsiella oxytoca, and the drug is CP, and/or the microorganism is of genus Klebsiella, particularly Klebsiella pneumoniae, and the drug is chosen from A/S, AZT, CAZ, CRM, and/or GM, and/or the microorganism is of genus Proteus, particularly Proteus mirabilis, and the drug is chosen from AM, A/S, CP, LVX, and/or T/S, and/or the microorganism is of genus Serratia, particularly Serratia marcescens, and the drug is chosen from AZT, CAX, CAZ, and/or CFT.

[0128] According to certain embodiments of any of the methods of the present invention the genetic variation is selected from at least one of structural variations of the nucleic acid sequences comprising at least a change in the nucleic acid sequence comprising more than one base, and single nucleotide polymorphisms (SNPs).

[0129] A fourth aspect of the present invention relates to a method of determining at least two genetic variations of nucleic acid sequences, comprising at least one genetic variation in a chromosome and at least one genetic variation in at least one plasmid, of a microorganism for a clinical isolate of the microorganism, particularly a bacterial microorganism, comprising:

obtaining or providing nucleic acid, e.g. gene, sequences of the clinical isolate of the microorganism, particularly the bacterial microorganism; and
determining the presence of the at least two genetic variations of the nucleic acid sequences comprising at least one genetic variation in a chromosome and at least one genetic variation in at least one plasmid in the nucleic acid, e.g. gene, sequences of the clinical isolate of the microorganism, particularly bacterial microorganism, as determined e.g. by the method of the first aspect.

[0130] With this method, antimicrobial drug, e.g. antibiotic, resistances in an unknown isolate of a microorganism, e.g. bacterial microorganism, can be determined.

[0131] A simple read out concept for a diagnostic test as described in this aspect can be as follows.

[0132] A sample, e.g. blood, from a patient, is used for molecular testing, e.g. using next generation sequencing (NGS), and then a molecular fingerprint is taken, e.g. in case of NGS a sequence of selected genomic/plasmid regions or the whole nucleic acid sequences, e.g. genome, is assembled. This is then compared to a reference library containing several reference sequences and/or a pan-genome, i.e. selected sequences or the whole sequence are/is compared to one or more reference sequences and/or a pan-genome, and structural variations (sequence/gene additions/deletions, etc.) and SNPs in the chromosomal nucleic acid sequences and the plasmid nucleic acid sequences are correlated with susceptibility/resistance profiles of reference sequences of the reference library. The reference library herein contains many nucleic acid sequences and/or one or more pan-genomes and is different from a reference genome. Then the result is reported, which can comprise ID (pathogen identification), i.e. a list of all (pathogenic) species identified in the sample, and AST (antimicrobial susceptibility testing), i.e. a list including a susceptibility/resistance profile for all species listed, based on genetic variations.

[0133] According to certain embodiments, statistical analysis in the present method is carried out using Fisher's test with p<10⁻³, preferably p<10⁻⁶, preferably p<10⁻⁹. Also, according to certain embodiments, the method further comprises correlating different genetic sites to each other.

[0134] Again, in the second, third and fourth aspect, the different steps herein can be carried out as described with regard to the first aspect of the present invention.

[0135] According to certain embodiments, the obtaining or providing of a sample containing or suspected of containing at least one microorganism, preferably a bacterial microorganism, e.g. one or more of Acinetobacter, Escherichia, e.g. E. coli, Enterobacter, Klebsiella, Proteus, Pseudomonas, Salmonella, Serratia, Shigella and/or Staphylococcus species, from the patient in the methods of the invention can comprise the following:

[0136] A sample of a vertebrate, e.g. a human, e.g. is provided or obtained and nucleic acid sequences, e.g. DNA or RNA sequences, are recorded by a known method for recording nucleic acid, which is not particularly limited. For example, nucleic acid sequences can be recorded by a sequencing method, wherein any sequencing method is appropriate, particularly sequencing methods wherein a multitude of sample components, as e.g. in a blood sample, can be analyzed for nucleic acids and/or nucleic acid fragments and/or parts thereof contained therein in a short period of time, including the nucleic acids and/or nucleic acid fragments and/or parts thereof of the microorganism. For example, sequencing can be carried out using polymerase chain reaction (PCR), particularly multiplex PCR, or high throughput sequencing or next generation sequencing, preferably using high-throughput sequencing. For sequencing, preferably an in vitro sample is used.

[0137] The data obtained by the sequencing can be in any format, and can then be analyzed as described with regard to the first to fourth aspect of the present invention.

[0138] In a fifth aspect the present invention relates to one or more computer program products comprising computer executable instructions which, when executed, perform a method according to any one of the first to the fourth aspect of the present invention.

[0139] In certain embodiments the computer program product is one on which program commands or program codes of a computer program for executing said method are stored. According to certain embodiments the computer program product is a storage medium. As noted above, the computer program products of the present invention can be self-learning, e.g. with respect to the first and second data sets.

[0140] In order to obtain the best possible information from the highly complex genetic data and develop an optimum model for diagnostic and therapeutical uses as well as the methods of the present invention—which can be applied stably in clinical routine—a thorough in silico analysis can be necessary. The proposed principle is based on a combination of different approaches, e.g. assembly of the nucleic acid, e.g. gene, sequences and/or genome of the microorganisms, at least in part and optionally annotating the sequences to one or more reference sequences and/or one or more pan-genomes, and/or alignment of the sequence data of the clinical isolate to be determined with one or more reference sequences and/or one or more pan-genomes, and correlation of structural variations and/or SNPs found in every sample in the chromosomal and plasmid nucleic acid sequence(s), e.g. from each patient, respectively an unknown clinical isolate, with all references and drugs, e.g. antibiotics, or only one or some of them, and search for structural variations and/or SNPs in the chromosomal and plasmid nucleic acid sequence(s) which occur for one or several drugs and in one or several strains.

[0141] Using the above steps a list of structural variations and/or SNPs in the chromosomal and plasmid nucleic acid sequence(s) with regard to one or more reference sequences and/or one or more pan-genomes is generated. This can be stored in databases, and statistical models can be derived from the databases. The statistical models can be based on at least one or more structural variations and/or at least one or more SNPs in the chromosomal and plasmid nucleic acid sequence(s). Statistical models that can be trained can be combined from structural variations, SNPs and/or sequences. Examples of algorithms that can produce such models are association Rules, Support Vector Machines, Decision Trees, Decision Forests, Discriminant-Analysis, Cluster-Methods, and many more.

[0142] The goal of the training is to allow a reproducible, standardized application during routine procedures.

[0143] For this, for example, nucleic acid, e.g. gene, sequences or parts thereof can be sequenced from a patient to be diagnosed. Afterwards, core characteristics can be derived from the sequence data which can be used to predict resistance. These are the points in the database used for the final model, i.e. at least one structural variation and/or one SNP in the chromosomal and plasmid nucleic acid sequence(s), but also combinations of one or more structural variations and/or one or more SNPs, etc.

[0144] The corresponding characteristics can be used as input for the statistical model and thus enable a prognosis for new patients. Not only the information regarding all resistances of all microorganisms, against all or only some or one drugs, e.g. antibiotics, can be integrated in a computer decision support tool, but also corresponding directives (e.g. EUCAST) so that only treatment proposals are made that are in line with the directives.

[0145] A sixth aspect of the present invention relates to the use of the computer program product according to the fifth aspect, e.g. for determining structural variations and/or SNPs in the chromosomal and plasmid nucleic acid sequence(s) of a microorganism for a clinical isolate of the microorganism in the fourth aspect of the invention and/or for use in the diagnostic method of the second method of the invention and/or for selecting a treatment in the third aspect of the present invention and/or in the method of the first aspect of the present invention.

[0146] A seventh aspect of the present invention is directed to a method of treating a patient suffering from an antimicrobial drug, e.g. antibiotic, resistant infection with a microorganism, preferably a bacterial microorganism, e.g. one or more of Acinetobacter, Escherichia, e.g. E. coli, Enterobacter, Klebsiella, Proteus, Pseudomonas, Salmonella, Serratia, Shigella and/or Staphylococcus species, comprising the steps of:

a) obtaining or providing a sample containing or suspected of containing at least one microorganism, preferably a bacterial microorganism, from the patient;
b) determining the presence of at least two genetic variations of the nucleic acid sequences comprising at least one genetic variation in the chromosome and at least one genetic variation in at least one plasmid, as determined by the method of the first aspect, wherein the presence of said at least two genetic variations of the nucleic acid sequences comprising at least one genetic variation in the chromosome and at least one genetic variation in at least one plasmid is indicative of a resistance to one or more antimicrobial drugs;
c) identifying said at least one or more antimicrobial, e.g. antibiotic, drugs;
d) selecting one or more antimicrobial, e.g. antibiotic, drugs different from the ones identified in step c) and being suitable for the treatment of the infection with the microorganism, preferably a bacterial microorganism; and
e) treating the patient with said one or more antimicrobial, e.g. antibiotic, drugs.

[0147] Herein, steps a) to d) can be carried out as described with respect to the fourth aspect. Step e) can be sufficiently carried out without being restricted and can be done e.g. non-invasively.

### Examples

[0148] The present invention will now be described in detail with reference to several examples thereof. However, these examples are illustrative and do not limit the scope of the invention.

[0149] For analyzing the effect of considering the chromosomal and plasmid nucleic acids for determining antimicrobial resistance, six different bacterial strains of different genera were considered in the Examples to show that the effect is not limited to a particular strain or genus. Also, only SNPs were considered in the Examples shown below for easier analysis, although similar effects as shown below were also obtained for Examples wherein structural variants were taken into account.

[0150] The following strains/species were considered, and the number of individual samples in each case was as given in Table 1.

TABLE 1
Number of samples used for each species

| Species | Number of samples |
|---|---|
| Acinetobacter baumannii | 435 |
| Escherichia coli | 941 |
| Klebsiella oxytoca | 310 |
| Klebsiella pneumoniae | 1101 |
| Proteus mirabilis | 457 |
| Serratia marcescens | 510 |

[0151] Nucleic acid sequencing was carried out in addition to classical antimicrobial susceptibility testing of the same isolates. This allowed performing genome wide correlation studies to find genetic variants (e.g. point mutations, small insertions and deletion, larger structural variants, plasmid copy number gains, gene dosage effects) in the nucleic acid sequences that are significantly correlated to the resistance against one or several drugs. The approach also allows for comparing the relevant sites in the genome to each other.

[0152] For determining genetic variants on the plasmids, pan-genomes were constructed. For constructing the pan-genomes, the data obtained by sequencing of the samples, as detailed below, were assembled and calculated using Roary (Rapid large-scale prokaryote pan genome analysis (Bioinformatics 2015 Nov. 15; 31(22): 3691-3. doi:

[0153] 10.1093/bioinformatics/btv421. Epub 2015 Jul. 20. Page AJ, Cummins C A, et al.). De novo assemblies were constructed using SPAdes (version 3.0.0, Bankevich A, Nurk S, Antipov D, et al. SPAdes: A New Genome Assembly Algorithm and Its Applications to Single-Cell Sequencing. Journal of Computational Biology. 2012; 19(5):455-477. doi:10.1089/cmb.2012.0021) with parameters -t 20 -m 256 -k 21,33,55,77 --careful -1 fp.fastq.gz -2 rp.fastq.gz. To determine the quality of the assemblies we ran QUAST (version 2.3) with minimal length threshold of 500 bp. Resulting metric values not matching the RefSeq assembly quality criteria (N50>5000, L50<20, # contigs <1000) were highlighted.

[0154] In the present approach the different sources of genetic resistance regarding structural variances as well as the different ways of how bacteria can become resistant were covered. By measuring clinical isolates collected in a broad geographical area and across a broad time span of three decades a complete picture going far beyond the rather artificial step of laboratory generated resistance mechanisms was tried to be generated.

[0155] To this end, a set of 21 clinically relevant antimicrobial agents with 5 different modes of action was put together, and the minimally inhibitory concentration (MIC) of the 21 drugs for the isolates was measured.

[0156] The detailed procedure is given in the following:

### Bacterial Strains

[0157] The inventors selected strains from the microbiology strain collection at Siemens Healthcare Diagnostics (West Sacramento, Calif.) for susceptibility testing and nucleic acid sequencing.

[0158] Antimicrobial Susceptibility Testing (AST) Panels Frozen reference AST panels were prepared following Clinical Laboratory Standards Institute (CLSI) recommendations. The following antimicrobial agents (with μg/ml concentrations shown in parentheses) were included in the panels: Amoxicillin/K Clavulanate (0.5/0.25-64/32), Ampicillin (0.25-128), Ampicillin/Sulbactam (0.5/0.25-64/32), Aztreonam (0.25-64), Cefazolin (0.5-32), Cefepime (0.25-64), Cefotaxime (0.25-128), Ceftazidime (0.25-64), Ceftriaxone (0.25-128), Cefuroxime (1-64), Cephalothin (1-64), Ciprofloxacin (0.015-8), Ertepenem (0.12-32), Gentamicin (0.12-32), Imipenem (0.25-32), Levofloxacin (0.25-16), Meropenem (0.12-32), Piperacillin/Tazobactam (0.25/4-256/4), Tetracycline (0.5-64), Tobramycin (0.12-32), and Trimethoprim/Sulfamethoxazole (0.25/4.7-32/608). Prior to use with clinical isolates, AST panels were tested with QC strains. AST panels were considered acceptable for testing with clinical isolates when the QC results met QC ranges described by CLSI16.

### Inoculum Preparation

[0159] Isolates were cultured on trypticase soy agar with 5% sheep blood (BBL, Cockeysville, Md.) and incubated in ambient air at 35±1° C. for 18-24 h. Isolated colonies (4-5 large colonies or 5-10 small colonies) were transferred to a 3 ml Sterile Inoculum Water (Siemens) and emulsified to a final turbidity of a 0.5 McFarland standard. 2 ml of this suspension was added to 25 ml Inoculum Water with Pluronic-F (Siemens). Using the Inoculator (Siemens) specific for frozen AST panels, 5 μl of the cell suspension was transferred to each well of the AST panel. The inoculated AST panels were incubated in ambient air at 35±1° C. for 16-20 h. Panel results were read visually, and minimal inhibitory concentrations (MIC) were determined.

### DNA Extraction

[0160] Four streaks of each Gram-negative bacterial isolate cultured on trypticase soy agar containing 5% sheep blood and cell suspensions were made in sterile 1.5 ml collection tubes containing 50 μl Nuclease-Free Water (AM9930, Life Technologies). Bacterial isolate samples were stored at −20° C. until nucleic acid extraction. The Tissue Preparation System (TPS) (096D0382-02_01_B, Siemens) and the VERSANT® Tissue Preparation Reagents (TPR) kit (10632404B, Siemens) were used to extract DNA from these bacterial isolates. Prior to extraction, the bacterial isolates were thawed at room temperature and were pelleted at 2000 G for 5 seconds. The DNA extraction protocol DNAext was used for complete total nucleic acid extraction of 48 isolate samples and eluates, 50 μl each, in 4 hours. The total nucleic acid eluates were then transferred into 96-Well qPCR Detection Plates (401341, Agilent Technologies) for RNase A digestion, DNA quantitation, and plate DNA concentration standardization processes. RNase A (AM2271, Life Technologies) which was diluted in nuclease-free water following manufacturer's instructions was added to 50 μl of the total nucleic acid eluate for a final working concentration of 20 μg/ml. Digestion enzyme and eluate mixture were incubated at 37° C. for 30 minutes using Siemens VERSANT® Amplification and Detection instrument. DNA from the RNase digested eluate was quantitated using the Quant-iT™ PicoGreen dsDNA Assay (P11496, Life Technologies) following the assay kit instruction, and fluorescence was determined on the Siemens VERSANT® Amplification and Detection instrument. Data analysis was performed using Microsoft® Excel 2007. 25 μl of the quantitated DNA eluates were transferred into a new 96-well PCR plate for plate DNA concentration standardization prior to library preparation. Elution buffer from the TPR kit was used to adjust DNA concentration. The standardized DNA eluate plate was then stored at −80° C. until library preparation.

### Next Generation Sequencing

[0161] Prior to library preparation, quality control of isolated bacterial DNA was conducted using a Qubit 2.0 Fluorometer (Qubit dsDNA BR Assay Kit, Life Technologies) and an Agilent 2200 TapeStation (Genomic DNA ScreenTape, Agilent Technologies). NGS libraries were prepared in 96 well format using NexteraXT DNA Sample Preparation Kit and NexteraXT Index Kit for 96 Indexes (Illumina) according to the manufacturer's protocol. The resulting sequencing libraries were quantified in a qPCR-based approach using the KAPA SYBR FAST qPCR MasterMix Kit (Peqlab) on a ViiA 7 real time PCR system (Life Technologies). 96 samples were pooled per lane for paired-end sequencing (2×100 bp) on Illumina Hiseq2000 or Hiseq2500 sequencers using TruSeq PE Cluster v3 and TruSeq SBS v3 sequencing chemistry (Illumina). Basic sequencing quality parameters were determined using the FastQC quality control tool for high throughput sequence data (Babraham Bioinformatics Institute).

[0162] Afterwards, the data were mapped and analyzed differently for a model that takes into account only chromosomal nucleic acid sequences, hereinafter also called chromosomal model, and for a model that takes into account both chromosomal and plasmid nucleic acid sequences, hereinafter also called PG model.

### Mapping:

[0163] Mapping was carried out for both models against the pangenomes given above and in the accompanying sequence protocol.

[0164] For the chromosomal model, mapping was furthermore also carried out against specific reference genomes that take into account only nucleic acid sequences on the chromosome, which are shown in the accompanying sequence protocol and are as follows: SEQ ID NO 1 showing the reference genome (NC_017847 as annotated at the NCBI) for Acinetobacter baumannii, SEQ ID NO 2 showing the reference genome (CP000948, as annotated at the NCBI) for Escherichia coli, SEQ ID NO 3 showing the reference genome (NC_009648, as annotated at the NCBI) for Klebsiella pneumoniae, SEQ ID NO 4 showing the reference genome (NC_016612, as annotated at the NCBI) for Klebsiella oxytoca, SEQ ID NO 5 showing the reference genome (NC_010554 as annotated at the NCBI) for Proteus mirabilis, and SEQ ID NO 6 showing the reference genome (NC_020211 as annotated at the NCBI) for Serratia marcescens.

[0165] The reference genomes were thereby selected for each bacterial species by correlating the data to all chromosomal reference genomes used in the pan-genome and selecting the best suited.

Reference sequence for Acinetobacter baumannii, strain NC_017847
(http://www.ncbi.nlm.nih.gov/nuccore/NC_017847)

| | |
|---|---|
| LOCUS | NC_017847 3964912 bp DNA circular CON 1 MAR. 2015 |
| DEFINITION | Acinetobacter baumannii MDR-TJ, complete genome. |
| ACCESSION | NC_017847 NZ_AEOE01000000 NZ_AEOE01000001 |
| | NZ_AEOE01000002 |
| | NZ_AEOE01000003 NZ_AEOE01000004 |
| VERSION | NC_017847.1 GI:387122089 |
| DBLINK | BioProject: PRJNA224116 |
| | BioSample: SAMN02603104 |
| | Assembly: GCF_000187205.2 |
| KEYWORDS | RefSeq. |
| SOURCE | Acinetobacter baumannii MDR-TJ |
| ORGANISM | Acinetobacter baumannii MDR-TJ |
| | Bacteria; Proteobacteria; Gammaproteobacteria; |
| | Pseudomonadales; Moraxellaceae; Acinetobacter; |
| | Acinetobacter calcoaceticus/baumannii complex. |
| REFERENCE | 1 (bases 1 to 3964912) |
| AUTHORS | Huang, H., Yang, Z. L., Wu, X. M., Wang, Y., Liu, Y. J., |
| | Luo, H., Lv, X., Gan, Y. R., Song, S. D. and Gao, F. |
| TITLE | Complete genome sequence of Acinetobacter |
| | baumannii MDR-TJ and insights into its mechanism of anti- |
| | biotic resistance |
| JOURNAL | J. Antimicrob. Chemother. 67 (12), 2825-2832 (2012) |
| PUBMED | 22952140 |
| REFERENCE | 2 (bases 1 to 3964912) |
| AUTHORS | Gao, F., Wang, Y., Liu, Y. J., Wu, X. M., Lv, X., |
| | Gan, Y. R., Song, S. D. and Huang, H. |
| TITLE | Genome sequence of Acinetobacter baumannii MDR-TJ |
| JOURNAL | J. Bacteriol. 193 (9), 2365-2366 (2011) |
| PUBMED | 21398552 |
| REFERENCE | 3 (bases 1 to 3964912) |
| AUTHORS | Huang, H., Yang, Z.-L., Wu, X.-M., Wang, Y., Liu, Y.-J., |
| | Luo, H., Lv, X., Gan, Y.-R., Song, S.-D. and Gao, F. |
| TITLE | Direct Submission |
| JOURNAL | Submitted (6 APR. 2012) Department of Physics, |
| | Tianjin University, No. 92, Weijin Road, Nankai District, |
| | Tianjin 300072, China |

Reference sequence for Escherichia coli, str. K-12 substr. DH10B:

| | |
|---|---|
| LOCUS | CP000948 4686137 bp DNA circular BCT 5 JUN. 2008 |
| DEFINITION | Escherichia coli str. K12 substr. DH10B, complete genome. |
| ACCESSION | CP000948 |
| VERSION | CP000948.1 GI:169887498 |
| DELINK | BioProject: PRJNA20079 |
| KEYWORDS | . |
| SOURCE | Escherichia coli str. K-12 substr. DH10B |
| ORGANISM | Escherichia coli str. K-12 substr. DH10B |
| | Bacteria; Proteobacteria; Gammaproteobacteria; |
| | Enterobacteriales; Enterobacteriaceae; Escherichia. |
| REFERENCE | 1 (bases 1 to 4686137) |
| AUTHORS | Durfee, T., Nelson, R., Baldwin, S., Plunkett, G. |
| | III, Burland, V., Mau, B., Petrosino, J. F., Qin, X., Muzny, D. M., |
| | Ayele, M., Gibbs, R. A., Csorgo, B., Posfai, G., The |
| | inventorsinstock, G. M. and Blattner, F. R. |
| TITLE | The complete genome sequence of Escherichia coli |
| | DH10B: insights into the biology of a laboratory workhorse |
| JOURNAL | J. Bacteriol. 190 (7), 2597-2606 (2008) |
| PUBMED | 18245285 |
| REFERENCE | 2 (bases 1 to 4686137) |
| AUTHORS | Plunkett, G. III. |
| TITLE | Direct Submission |
| JOURNAL | Submitted (20 FEB. 2008) Department of Genetics |
| | and Biotechnology, |
| | University of Wisconsin, 425G Henry Mall, |
| | Madison, WI 53706, USA |
| COMMENT | DH10B and DH10B-T1R are available from Invitrogen |
| | Corporation (http://www.invitrogen.com). |

Reference sequence for Klebsiella oxytoca, strain NC_016612
(http://www.genome.jp/dbget-bin/www_bget?refseq+NC_016612)

| | |
|---|---|
| LOCUS | NC_016612 5974109 bp DNA circular CON 7 FEB. 2015 |
| DEFINITION | Klebsiella oxytoca KCTC 1686, complete genome. |
| ACCESSION | NC_016612 |
| VERSION | NC_016612.1 GI:375256816 |
| DBLINK | BioProject: PRJNA224116 |
| | BioSample: SAMN02603580 |
| | Assembly: GCF_000240325.1 |
| KEYWORDS | RefSeq. |
| SOURCE | Klebsiella oxytoca KCTC 1686 |
| ORGANISM | Klebsiella oxytoca KCTC 1686 |
| | Bacteria; Proteobacteria; Gammaproteobacteria; |
| | Enterobacteriales; Enterobacteriaceae; Klebsiella. |
| REFERENCE | 1 (bases 1 to 5974109) |
| AUTHORS | Shin, S. H., Kim, S., Kim, J. Y., Lee, S., Um, Y., |
| | Oh, M. K., Kim, Y. R., Lee, J. and Yang, K. S. |
| TITLE | Complete genome sequence of Klebsiella oxytoca |
| | KCTC 1686, used in production of 2,3-butanediol |
| JOURNAL | J. Bacteriol. 194 (9), 2371-2372 (2012) |
| PUBMED | 22493189 |
| REFERENCE | 2 (bases 1 to 5974109) |
| AUTHORS | Shin, S. H., Kim, S., Kim, J. Y., Yang, K.-S. and |
| | Seo, J.-S. |
| TITLE | Direct Submission |
| JOURNAL | Submitted (21 DEC. 2011) Life Science Institute, |
| | Macrogen Inc., 10F, World Meridian Center, 60-24, Gasan-dong, |
| | Kumchun-gu, Seoul 153-781, Republic of Korea |

Reference sequence for Klebsiella pneumoniae, strain
NC_009648 (http://www.genome.jp/dbget-bin/www_bget?refseq+NC_009648)

| | |
|---|---|
| LOCUS | NC_009648 5315120 bp DNA circular CON 7 FEB. 2015 |
| DEFINITION | Klebsiella pneumoniae subsp. pneumoniae MGH |
| | 78578, complete sequence. |
| ACCESSION | NC_009648 |
| VERSION | NC_009648.1 GI:152968582 |
| DBLINK | BioProject: PRJNA224116 |
| | BioSample: SAMN02603941 |
| | Assembly: GCF_000016305.1 |
| KEYWORDS | RefSeq. |
| SOURCE | Klebsiella pneumoniae subsp. pneumoniae MGH 78578 |
| ORGANISM | Klebsiella pneumoniae subsp. pneumoniae MGH 78578 |
| | Bacteria; Proteobacteria; Gammaproteobacteria; |
| | Enterobacteriales; Enterobacteriaceae; Klebsiella. |
| REFERENCE | 1 (bases 1 to 5315120) |
| AUTHORS | McClelland, M., Sanderson, E. K., Spieth, J., |
| | Clifton, W. S., Latreille, P., Sabo, A., Pepin, K., |
| | Bhonagiri, V., Porwollik, S., Ali, J. and Wilson, R. K. |
| CONSRTM | The Klebsiella pneumonia Genome Sequencing Project |
| TITLE | Direct Submission |
| JOURNAL | Submitted (6 SEP. 2006) Genetics, Genome Sequencing |
| | Center, 4444 Forest Park Parkway, St. Louis, MO 63108, USA |

Reference sequence for Proteus mirabilis, strain NC_010554
(http://www genome.jp/dbget-bin/www_bget?refseq+NC_010554)

| | |
|---|---|
| LOCUS | NC_010554 4063606 bp DNA circular CON 7 FEB. 2015 |
| DEFINITION | Proteus mirabilis strain HI4320, complete genome. |
| ACCESSION | NC_010554 |
| VERSION | NC_010554.1 GI:197283915 |
| DBLINK | BioProject: PRJNA224116 |
| | Assembly: GCF_000069965.1 |
| KEYWORDS | RefSeq; complete genome. |
| SOURCE | Proteus mirabilis HI4320 |
| ORGANISM | Proteus mirabilis HI4320 |
| | Bacteria; Proteobacteria; Gammaproteobacteria; |
| | Enterobacteriales; Enterobacteriaceae; Proteus. |
| REFERENCE | 1 |
| AUTHORS | Pearson, M. M., Sebaihia, M., Churcher, C., |
| | Quail, M. A., Seshasayee, A. S., Luscombe, N. M., Abdellah, Z., |
| | Arrosmith, C., Atkin, B., Chillingworth, T., Hauser, H., |
| | Jagels, K., Moule, S., Mungall, K., Norbertczak, H., |
| | Rabbinowitsch, E., Walker, D., Whithead, S., Thomson, N. R., |
| | Rather, P. N., Parkhill, J. and Mobley, H. L. |
| TITLE | Complete genome sequence of uropathogenic Proteus |
| | mirabilis, a master of both adherence and motility |
| JOURNAL | J. Bacteriol. 190 (11), 4027-4037 (2008) |
| PUBMED | 18375554 |
| REFERENCE | 2 (bases 1 to 4063606) |
| AUTHORS | Sebaihia, M. |
| TITLE | Direct Submission |
| JOURNAL | Submitted (18 FEB. 2008) Sebaihia M., Sulston |
| | Laboratories, Wellcome Trust Sanger Institute, |
| | Wellcome Trust Genome Campus, Hinxton, Cambridge, |
| | CB10 1SA, UNITED KINGDOM |

Reference sequence for Serratia marcescens, strain NC_020211
(http://www.genome.jp/dbget-bin/www_bget?refseq+NC_020211)

| | |
|---|---|
| LOCUS | NC_020211 5241455 bp DNA circular CON 7 FEB. 2015 |
| DEFINITION | Serratia marcescens WW4, complete genome. |
| ACCESSION | NC_020211 |
| VERSION | NC_020211.1 GI:448239774 |
| DBLINK | BioProject: PRJNA224116 |
| | BioSample: SAMN02602965 |
| | Assembly: GCF_000336425.1 |
| KEYWORDS | RefSeq. |
| SOURCE | Serratia marcescens WW4 |
| ORGANISM | Serratia marcescens WW4 |
| | Bacteria; Proteobacteria; Gammaproteobacteria; |
| | Enterobacteriales; Enterobacteriaceae; Serratia. |
| REFERENCE | 1 (bases 1 to 5241455) |
| AUTHORS | Kuo, P. A., Kuo, C. H., Lai, Y. K., Graumann, P. L. and |
| | Tu, J. |
| TITLE | Phosphate limitation induces the intergeneric inhibition of |
| | Pseudomonas aeruginosa by Serratia marcescens |
| | isolated from paper machines |
| JOURNAL | FEMS Microbiol. Ecol. 84 (3), 577-587 (2013) |
| PUBMED | 23398522 |
| REFERENCE | 2 (bases 1 to 5241455) |
| AUTHORS | Chung, W. C., Chen, L. L., Lo, W. S., Kuo, P. A., Tu, J. |
| | and Kuo, C. H. |
| TITLE | Complete Genome Sequence of Serratia marcescens WW4 |
| JOURNAL | Genome Announc 1 (2), E0012613 (2013) |
| PUBMED | 23558532 |
| REMARK | Publication Status: Online-Only |
| REFERENCE | 3 (bases 1 to 5241455) |
| AUTHORS | Chung, W.-C., Chen, L.-L., Lo, W.-S., Kuo, P.-A., |
| | Tn, J. and Kuo, C.-H. |
| TITLE | Direct Submission |
| JOURNAL | Submitted (26 NOV. 2012) Institute of Plant and |
| | Microbial Biology, Academia Sinica, 128 Sec. 2, |
| | Academia Rd., Taipei 115, Taiwan |

[0166] Raw paired-end sequencing data for the samples were mapped against the respective pan-genomes with BWA 0.6.1.20. The resulting SAM files were sorted, converted to BAM files, and PCR duplicates were marked using the Picard tools package 1.104 (http://picard.sourceforge.net/).

### Data Analysis

[0167] For the chromosomal model, analysis was as follows: The Genome Analysis Toolkit 3.1.1 (GATK) was used to call SNPs and indels for blocks of 200 samples (parameters: -ploidy 1 -glm BOTH -stand call conf 30 -stand emit conf 10). VCF files were combined into a single file and quality filtering for SNPs was carried out (QD<2.0∥FS>60.0∥MQ<40.0) and indels (QD<2.0∥FS>200.0). Detected variants were annotated with SnpEff22 to predict coding effects.

[0168] For matching the obtained SNPs in the reference genomes with the pan-genomes, the following analysis was carried out:

[0169] 1. The gene containing the variant was identified (gene entry in the corresponding GenBank file of the reference genome), i.e. the genomic position of the variant must be within the gene start and end interval. The start and end positions of the subsequence containing the variant were determined as follows: Start was set to (genomic position of the variant−250 bases) and end to (genomic position of the variant+250 bases). If the start/end position were beyond the gene start/end then they were set to start/end positions of the gene.

[0170] 2. The extracted variant containing subsequences were aligned against the pan-genome of the corresponding species using blastn.

[0171] 3. The blastn results were filtered: Only matches with sequence identity>=80% and aligning>=80% of the variant containing subsequence were kept.

[0172] 4. For each of the remaining matches the position of the variant within the pan-genome gene was determined.

[0173] 5. These positions were searched in the corresponding filtered VCF files (i.e. VCF (Variant Call Format) file containing analyzed variants). For easier analysis, only the 50 SNPs with the best p-values in the SNP analysis were taken into account. Only variants which could be mapped to the pangenome and were found in corresponding VCF files were considered: They were coded as binary variables: 0=no reference allele, 1=reference allele, NA=missing.

[0174] Resistance profiles were determined with w.r.t. EUCAST MIC breakpoint guidelines (v. 4). Samples considered were only samples after filtering w.r.t. assembly quality and taxonomic assignment. For obtaining an optimized model, decision tree analysis was carried out as follows:

Model: Decision tree from R-package rpart; maximal depth=5, other parameters set to “force” more complex trees containing multiple features; the set parameters affect the number of features in the model

[0175] For the PG model, the analysis was as follows:

10 repetitions of 5-fold cross-validation were carried out. In each fold, features were selected by ranking them using a GWAS (genome-wide association study) approach with PCA (principal component analysis) adjustment. The final model was built from the most occurring features from the cross-validation. For obtaining an optimized model, decision tree analysis was carried out as follows:
Model: Decision tree from R-package rpart; maximal depth=5, default parameters, pruning (decreasing tree size to avoid over fitting; the set parameters affect the number of features in the model

[0176] Due to the different approaches taken for the analysis of only the chromosomal nucleic acid sequence on the one hand and for the analysis of both chromosomal and plasmid nucleic acid sequences on the other hand, a comparison of the data sets was actually quite difficult in some cases, so that only selected cases are shown in the following.

[0177] Selected results for the different species are given in tables 2 to 7. In the tables, the column “drug” refers to the respective antibiotic used in each exemplary analysis, columns 2 and 3 refer to the model using only chromosomal nucleic acid sequences, and columns 4 and 5 refers to the model that takes into account both chromosomal and plasmid nucleic acid sequences (termed “PG model”). Further, the term “B_ACC” refers to the balanced accuracy, and the term “features” refers to the different SNPs that were used in the decision trees obtained for the respective models in tables 2 to 7.

[0178] The balanced accuracy was thereby used for analyzing the data as it gives more balanced results, as explained in the following.

[0179] The balanced accuracy is defined as the arithmetic mean of sensitivity and specificity=(sensitivity+specificity)/2 with sensitivity=TP/(TP+FN) and specificity=TN/(TN+FP).
[0180] TN=true negatives=susceptible and predicted to be susceptible
[0181] TP=true positives=resistant and predicted to be resistant
[0182] FN=false negatives=resistance, predicted to be susceptible
[0183] FP=false positives=susceptible, predicted to be resistance

[0184] It is a better performance estimate than accuracy ((TP+TN)/(number of samples)) in case of imbalanced datasets, e.g. if there are much more resistant samples when non-resistant ones or vice versa. In such cases accuracy may be high, although the “smaller” class is not predicted correctly, as seen in the following exemplary numerical case—the balanced accuracy is less biased by the data imbalance.

[0185] Exemplary numerical case: 11 samples are resistant, 51 are susceptible and TP=50, TN=1, FN=1, FP=10. Then accuracy=(50+1)/62=82.26% and balanced accuracy is ((50/51)+1/11))/2=53.57%.

[0186] A comparison of the two models is only shown in the subsequent tables if both models have at least 2 unique variants.

TABLE 2
Results of Examples for Acinetobacter baumannii

| | B_ACC | number | | PG |
|---|---|---|---|---|
| | using only | of features | B_ACC | model number |
| Drug | chromosome | (chromosome) | (PG model) | of features |
| CP | 80.7 | 4 | 85.34 | 7 |
| IMP | 61.2 | 3 | 62.11 | 2 |
| LVX | 89.35 | 7 | 91.48 | 3 |

TABLE 3
Results of Examples for Escherichia coli

| | B_ACC | number | | PG |
|---|---|---|---|---|
| | using only | of features | B_ACC | model number |
| Drug | chromosome | (chromosome) | (PG model) | of features |
| CRM | 55.65 | 8 | 62.71 | 7 |

TABLE 4
Results of Examples for Klebsiella oxytoca

| | B_ACC | number | | PG |
|---|---|---|---|---|
| | using only | of features | B_ACC | model number |
| Drug | chromosome | (chromosome) | (PG model) | of features |
| CP | 93.05 | 3 | 93.76 | 2 |

TABLE 5
Results of Examples for Klebsiella pneumoniae

| | B_ACC | number | | PG |
|---|---|---|---|---|
| | using only | of features | B_ACC | model number |
| Drug | chromosome | (chromosome) | (PG model) | of features |
| A/S | 72.6 | 5 | 77.48 | 4 |
| AZT | 88.5 | 6 | 88.81 | 2 |
| CAZ | 87.65 | 6 | 87.98 | 4 |
| CRM | 79.65 | 7 | 81.83 | 4 |
| GM | 70.45 | 8 | 70.47 | 12 |

TABLE 6
Results of Examples for Proteus mirabilis

| | B_ACC | number | | PG |
|---|---|---|---|---|
| | using only | of features | B_ACC | model number |
| Drug | chromosome | (chromosome) | (PG model) | of features |
| AM | 70.75 | 2 | 74.46 | 4 |
| A/S | 51.3 | 2 | 62.91 | 2 |
| CP | 86.35 | 2 | 89.11 | 5 |
| LVX | 83.75 | 2 | 87.77 | 4 |
| T/S | 68.45 | 2 | 71.35 | 3 |

TABLE 7
Results of Examples for Serratia marcescens

| | B_ACC | number | | PG |
|---|---|---|---|---|
| | using only | of features | B_ACC | model number |
| Drug | chromosome | (chromosome) | (PG model) | of features |
| AZT | 58.7 | 8 | 69.67 | 5 |
| CAX | 58.1 | 5 | 68.08 | 2 |
| CAZ | 60.05 | 3 | 62.82 | 5 |
| CFT | 58.6 | 6 | 67.45 | 5 |

[0187] As can be seen from the tables, the balanced accuracy—and therefore the prediction of antibiotic resistance—improved for the different tested drugs all over the different bacterial species using the nucleic acid information from both the chromosome and the plasmids.

[0188] It is noted that the number of features in the tables for achieving the best results in balanced accuracy often vary, which is a result of the optimization approach which was used in the present models for achieving these results and which were not limited to achieve certain comparable numbers of features in the decision trees. Notably, though, the variances in numbers of features shifts in both directions, i.e. sometimes more feature numbers are obtained in the model using chromosomal nucleic acid sequences only, and sometimes more feature numbers are obtained in the PG model, showing that there is no bias in any of the models for a higher number of features. Further, the data for the drug A/S for Proteus mirabilis actually had the same number of features for both models, which show that the effect is also independent of the number of features and can be obtained for a combination of at least two features. It is to be noted that the features in the two models in this case also differed. Overall an improvement in performance is seen when the plasmid nucleic acid sequences are taken into account.

[0189] Further to the results in the tables, it was also again confirmed that a combination of more than one, e.g. i (being a natural number), variants performed significantly better than single variants. It was also seen in the data that the power of predicting genetic resistance increased if variants from different genes were selected.

[0190] While in the first step all i variants could have been theoretically selected from the same gene, the performance increased when j (again being a natural number) variants are selected that come from at least two different genes. Further improved results were obtained when the mutations were selected from the chromosome and the plasmid, as seen in the above tables.

[0191] In the examples, it was demonstrated that the performance of predicting resistance of the bacteria further increases if the full set of all genes from the chromosome and the plasmid is used. By using the full genetic set available, we outperformed the results that are solely based on the bacterial chromosome, demonstrating that adding the plasmid information and combining it with the chromosomal genes is an important step towards improved prediction of bacterial resistance.

[0192] As already stated above, notably the information described herein does not only refer to single variants (SNPs) and combinations of those. The same also applies for the abovementioned larger structural variations; also in this case the performance gets better if genes from bacterial chromosomes and plasmids are included in the bioinformatics analysis as compared to the performance of single genes from the chromosome or combinations of genes from the chromosomes of bacteria.

The application's sequence listing, which the Patent Office published only in electronic form, follows.

SEQUENCE LISTING (6 sequences)

SEQ ID NO: 1 - DNA, 3964912 bp, Acinetobacter baumannii (residues 1-1,982,456 of 3,964,912)
ttatacacaaagtaattgtttatttttattaagacttttaagatatacacttcttatttacatacttatcaacaaaccttgatgtgaagttgattttgatttggtatatttgaatttaaattcatattttttagttatccacaatttggatcagccctattaaataaattcaaattttaaaatttaaatttattcttattagtgtggacttttcttgtggatttcacagttttaaatttaaaaaacatatatttgaactgttgataactctgtttttattgtctttatggattgtggataagtttatgtgataatttatccacaggatgtgcaaaaagttattcacaattgattttgaatttaaatttattcacaagagatttctttttaggcaaaatcaaacgaaatcgtcatgacagatgtggataacttgggtagaatggcgaccccttctcatcaggaagggttaatctttaaatgatttgaatttaaaacgcagacataggggatacacatgctttggacagactgcttaactcgcttgcgacaagagctctctgataacgtctttgcgatgtggattcgccctttagtagctgaagaagtagaggggatactacgtctctatgctcctaatccttattggacgcgttatattcaagagaatcatttagagttaatttctatattggctgaacaattgtcagaagggcgggtgcgtcaggttgaaatcttggtagattctcgtcctggtagtattttgtcctctagtgaacagcctgcaacaactacagcagctttacaaactgcccctatacctcaacctgctaaggttaaaagagaaccggaacctgttgctaatactgcagttagttctaagagttcaaaaaagaaactattaaatccacaatttactttttcactatttgttgaaggccgttctaaccaaatggcagcagaaacctgtagaaaagtattaacacagttaggtgcttctcaacataaccctttgtttttatatggtccgacaggtctaggtaagactcacttaatgcaagcagttggtaatgccttactgcaagcgaagccgaatgcaagagtcatgtatatgacttcagaaagttttgtacaagattttgtgagctcattacaaaaaggaaaggtagaagagtttaagaaaaattgccgttctttagacttgttattagtagatgatattcatcttttggcaggaaaagaagcaagcctcgttgaattcttctatacatttaatgccttacttgatgaatccaaacaaattattttaacgtcagatcgataccctaaagaattaacagaacttgatcctcgattggtttctcgtttttcttggggactgtcagtaggtgttgaaccacctgatattgaaactcgaatcgaaattctgcttaaaaaagctgaaaatagtggcgttgatttacctagaaactgtgcgttgtttattgcccaacaagtcgtagcgaacgtacgtgaacttgagggcgcactgaataaagttgtcgcaatttcacgttttaaaggtgctccaattgaccttgatgtcgtacgggaatctttaaaagatgttttagcgatccgtgctcgtacaattagtgtagaaaatatccagcgtgtagtgagtgaatatttccgaattccattaaaagagctggtaggtccaaagcgtacccgaatttatgctcgaccacgtcagttggcgatggggcttgcccgtgaattaacgggagatagttttcctgaaattggaatggcttttggtgggcgtgatcacagtacagtgatgcatgcttgtgaaaaagtcgtcagtttacgggaagaagacccaatctttgatgaagattataagaacttattacgtttgcttcaaagttaatgaaataataagacgttgttgcaaagtctacgtaagtgcagcatagtacacagctaaaaaatgaaatgtttgctccaagttgctagaggaatgaatcgtgcgtttgaaaatcgctaaagaaagtttactcaatgttttatcgcatgtggtcggtgcggtagaacgtcgtcataccttgaatattctttcaaacgtcaaaattcagactaatgctcaagcgctcactattacgggttccgatttagaagttgaactcgtagcgagcaccgctttatcagaaggggcgtgccttgaggcaggcgagacaactgttcctgctcgtaaattgatggaaatttgtaaatctttgcctacagctgcattgattgatttacaaattactgaagatcaaagatgtattttaaagtctggtaatagccgttttgtgctaggtacactaccggctgaagattatccattgttaaccactgagaatagccaaggtacgcaagtacaggtgactcaacgtgaattaaagcgtttatttgaaaaaactgcttttgcaatggctgtacaagatgtacgtttttacctcactggtactttattagaaattgatgaaaatcaattgcgtgcagtaacaactgatggtcaccgtttagcactttgtgaaattttggcttcctctacttcatctcagctggtacaagcgattgtgcctcgtaaagctgtgggcgaattgcaacgtttactcagcattgaagatgaacagctcacattgcttattggccgtgaattattaaatgtaacgattaatacgccaagccgtgataaagaacaaggtgatattacagttcgctttacaactaaattgattgatgggaaattccctgattatcgccgtgttattccacgtggtggtgataaacatgttttgattggtcatgacgtatttaaacaatcattacaacgtgtagcaattttaagtaatgaaaaattgcgtggtgttttcctaaacttcaatcaggattctttacagcttcgtgcaaataaccctgaacaagatgaagcaattgaagatttagcgatccaatatcaaaatgccccattagaaatgtcatttaatgctcaatacctactcgatgtgttgggtgtgttagatggtgatgatgtaaatatgagcatgactgaggcgaatcagtctgtattggttcaagatccggctcaccctgaccagacctatgtggttatgccgatgcgtgtttaatctggtttaactatatgcatcttacgcgcttaaatattgaacgtgtgcgtaatttaaaaacggttgcactccatgggttgcaaccgtttaatgtcttttatggcgcaaacggttcgggtaaaacatcaattttagaagcgatccatttgcttgcaacaggtcgctcattccgtacacatatacccaaaaattatattcaatatgaagctgacgacgcgattgtatttgctcagtcagcaactgaaaaaattggtatgcagaaactcgcttctggtgagcaactcatgaaagtgaatggcgataccgttgcgactcaaggtcagctcgcaaagttacttcctttacagcatattgatccacaaagtacggatattattgatcatggtgccaagccaagaagacaacttttagattggcttatgttccacgtggaacctgaattttattttgcgtggcaatattactctcgtgcgctaaagcagcgtaataccttactcaaaacacggcgtaatctttcattagctgatttagaaccgtggaacaaaatgttgagtaattatggcgagattttgcactcacagcgtttaagtattgtcgagcaatggaatgtttatttccaaaatgacttaagtcaattactgcctgatttggagattgagctggaatatagcccaggttttcatacagagcaggggcttatgcaagacttgctgaatcagcatcaaaaagacatcgagagacgttataccgagtatggtcctcatcgggcagatttgcgcttaaaaacgccatttggacatgctgatgatgttttatcaagaggtcagaaaaaactcttgattattgccttaaaactgtcacaaattgcaatgttgcatgcgagtaataaggaaactgtggtattattagatgatctgacagcagaattagacttaaccgcacaacaacgtttaattgaacgattaagccaacttggtagccaggtttttatgacaactttagatcatgcatcggtaaaaaaacatttacatgatctgtctatttcatatcaattattcagtgttgaatccggtcaagttagtcttgctgcgccataattttttgatgttacccatctttgaataaacctatatttgctagggagaaaccatgagttcagagtctcaatcagcctctcaaacagaacaaaccaatgaaaaggcttatgattcctctagtattaaagtattacgtggattagatgcagttcgtaaacgtccgggtatgtatattggggatacagacgacggtaccggtttacaccatatggtgtttgaggttgtcgataatgcaatcgatgaagctttagctggccactgtgatgaaattattgtcacgattcacgaggatgaatcggtcagtgtttcagataatggccgcggtattccaaccgatattcaccctgaagaaggggtttctgctgcagaagtaattttaacgattctgcacgcaggcggtaagtttgacgataatagctataaagtttcaggtggcttacacggcgtaggtgtttcggttgttaacgcactttcaagtaaattgcatttaacgatttaccgtgctggtcaaatccatgagcaagaatatcatcatggtgatccgcaatatccattgcgtgtgattggtgaaacggataataccggaacaactgtacgtttttggccaagtgcagaaacattcagtcaaaccatttttaatgttgaaattctagcacgccgtttacgtgagctttctttcttgaatgctggtgtacgtatcgttttacgtgatgaacgtattaaccttgagcatgtgtatgactatgaaggcggtttatctgagtttgtaaaatacatcaacgaaggtaaaaaccatctcaacgaaatcttccatttcacagctgatgctgacaacggtattgctgtagaagttgcattgcaatggaacgatagttaccaagaaaatgttcgctgtttcacaaacaacattccacaaaaagatggtggtacgcacttagcaggtttccgcgcagctttaacacgtggcttaaaccagtatcttgaaaatgaaaatattctcaagaaagaaaaagtgaatgtgactggtgatgatgcgcgtgaaggtttaacagcgattatttctgttaaggttcctgatccgaaattctcgtctcagacaaaagaaaaattggtatcaagtgaggtaaaaccagcggtagagcaagcaatgaacaaagagttctctgcttacttacttgagaatccacaagctgcaaaatcaattgcaggcaagattattgatgctgcacgagcacgtgatgctgcacgtaaagcgcgtgaaatgacacgtcgtaagagtgcattagatattgcaggtttgcctggtaaattggctgattgtcaggaaaaagacccagcgctttctgaattgtatcttgtcgagggtgactcagcgggtggtagtgccaaacaaggccgtaaccgtaaaatgcaggctattctacctttaaaaggtaagatcctgaacgttgagcgtgcgcgctttgacaaaatgatctctagtcaggaagtaggtacattaattacagcacttggctgtggtattggccgtgaagaatataaccctgacaagctccgttatcataaaattattattatgaccgatgccgatgtcgatggttcgcacattcgtacattgttattaacattcttcttccgtcaaatgccggagttggtggaacgtggtcatatttatattgcacagccacctttgtataaactcaaaaagggtaagcaagagcaatatattaaagataacgacgcattagaaacttacttgatttcaaatgcgattgatgagcttgctttacatattagtgctgatgcgcctgcaattacaggtgaagcgctggcaaaagtaattcaagactatcaagtttcacaaaagagcttacaacgcttaacgttacgttatcccgcaagcttactggatgcattactcgaagtcgacgcatttaaagcagatcagaaccatgatcaagcttatgtccagcaatgggcggatcaagtacgtgaagctgtacaaagactacagccaagtttgcgccctgaaattacgcttgaaacatttgaacgtgagaatgctcaaggcgagaaatctgcgcattactggccacgtgtaactgtatatgttcataacttgccacatgcttacttacttgacgcaggtttattgaattctgcggaatatgctcgtttattgaagaactcgaagagttggttcaagttaattgaagatggcgcatacttacaaaaaggtgatcgtcgtattcaagtcgctaatttccatcaggtatggcagcacattctgcaagattcacgccgtggaatgatgatccagcgctataaaggtctgggcgagatgaatgctgagcagctttgggaaaccacaatggaccctgaaaaccgtaatatgttacaggtgactattgatgatgcaattgaagctgatcgcatgttctcatgcttaatgggcgatgatgttgaaccacgtcgtgcctttattgaagaaaatgcattaaatgcggatattgatgcttaattgatagcaagattctaaatcagtctagggagagaagatgatgagtcaaaaaattctagcaagtatgctgatttcatgtgcggctttagtgagtcattctgcatttgcagcagacttggaagccgacatgaaaactttagcgaagagcactaaagcctttgctgaagcaaaagatatcgataacgctaaacagcagcttgtgattatgcgccaggcagcattatcttcaaaattatctttacctcataagttggaaggtttaccccctgaaaatgtacaggtaaaagagtaccaagcgggtttagatcagttggttgctgaaattgatcgggttacggtttttgttgataagggacaattggaccaagccaaaactgaagcaattaatctggtaaatattcgtaatgaaaaccacaaaaagtttagataaagttactttaatctaaatcaaataaagggaatgattgattcattccctttatttttagctatataaatttatttaactaaacattaattttctacaaaatctgtaacttgaatgagtgcatggccaaataggtagccagccgttaaaaggatgcagatccacaaaatagctcctgccacattgtaaatcaaaaattttccatagctcatattgcttgagccggcagcgaggggtgcaaaagaacgtgcgaaaggaataaaacgtgctaaaagaatagttttaccgccatgttgcaagaaatagcggttcgttttattcaaatattcttttttaataaaacgtgattttgcttcaaaaatacggtttccaaaatggcggccaatagaataattgacgatatagcctaatgttgctgcaacggtgagcagagtaatcatataaccaagatgcatcagttcaacaaccgagcacaatgcacctacagttaaaagtaagctatctccaggtaaaaagaacataaacacaaaagcggtttcagaaaaaataatcaaaaagagtatggcataaacccatgcaccatactcctgaatcaaaataggtaaaaattgttcaaaattagtaataaaatcaataaaattcattcagtttgtctgatcccgaattaaatacctactcaagaagggtaaaaacgaagttagagaatttagttaaattatctgtgtatggcaacccttaagatgtagcttaagttttatatgttatcaaatttgaatctatctcaaaaatttaacagctgaatgaaactttattagagatcgtccatatttttataagctaataaaaataaaagccagtacagatacttaaatatacgagtactggccaaggtatttaattttcaaatgaggcttccatttcctcaagttccatcatgagttctaagagttgctcttcatattgttcaagcttagctttgagttcggtttgctcattcatcagtttaagcaaatcgtccttacgattagcttcatatagtgaagtatctgctaaagcttcttcgatttcagcaagacgtggttgaagcttttcaatttgagattcaaccttttcaatatttttacggattggtcgagtttgttcacgacggcgagctgcttctttacgctgtgcttctttatcgactttagcgggagctggagcggcagaagatgaattattttgtgctacagcagtctgagcattgatttgttgctggcgtgcttcacgtagccatttagcataatcctgcaaatcaccttcaaactcggtacatttgccaccgtgtaccaaaaggagttcatcacaaacgctggcaataagttgacgttcgtgagaaaccagaacgactgcaccctcaaaatcttgtaaggccatactaagcgcatgacgcatatcaaggtctaagtggttcgttggttcatccagaattaaaacatttgggcgctgccatacaatgagtgctaaggccaaacgagcacgctcacccccagagaagctttcacatggagtatccatgcgttcgccactaaagccaaaactacctaaaaaagaacgtaatgttgcttcactaatttgtttatcggctatccgagcgagttgaagcattgggctggcttgaccatctaaagcgtccatttggtgctgtgcaaagtaaccaatgttaagtagctcggaagctttacgttcacctgccagtaatggtaaatctcccaccaagcttttaatcaatgttgatttacctgcaccattcataccaagcagaccaatacgcgagtttggcgtaatttgaagtttaattttttcagcaatttttttatcgccataacctatgctggcattttctagggtcagcaacggtgaactcattttggtaggttcacggaaactaaaagtaaacggtgtatctacatgagcaggtgcaagttgctgcatgcgttcaagttgcttaatacgactttgtgcctgacgagctttagtggctttagccttaaagcgatcaatgaacttttgtaaatgagcacgggcttcttgctgtttttcaaaagcttgttgttgttgtgctaaacgttcacttcgagtggtctcaaatgtggagtagttacccgtgtaaagagtaagttcctgattctcaatatgaagaatatggtctgtaattgcatctaagaaatctcggtcatgcgagattaaaatgagggtgccctcataagctttgagccaatcttctaaccataaaattgcatccaaatctaagtggttggttggctcatccaataaaagtaagtcagaacgactcatcaatgtacgcgccaaatttagacgcatacgccatccaccagaaaaactagcaacgtttaaacgtaattgatgttctagaaaccctaagccagccatcagctgagctgctttagatggcgcagaataaccatgaatttcatcaaaacggccatgtaatttagccaaatccgagtctgttaattgttcaggttgagcaagtttattttgaatatcccaatattcttcatctccagaaaggacaaaatcgatagcaggcatgtctagggctttaacttcttgcgccatatgagccacagtccatacggaaggacgagtaagcgagccttcatctgctcctaagctaccgagtaatgctgcaaatagtgttgatttacctgcaccattgaccccagttagaccaatcttccaacctgggtgtaattgcatagacgctttttgaaatagaacacgtccaccgcggcgtaaagaaacttggtcaaattgaatcatcttgtcttatcgaggtgagttagggatgctatattttaaagagaactgatcatgaagacaaaactttcggagttttagtttataaatactgagattgcatggttgaattgcttcccattaaagctattcgtctgaaaatatccaaattttgagcaagataggccacatttagaaaaatatggctaaaataaaaacaatttaaaacttggttgataaatgagctactaactaataaaaccagactaaggaaagtcaaatgaaaaaaagattggggatagtaagtgcagtcatttgctgtgctatggggacaacacacgcggggcaaaacgtatgtgtattcgatttattgggtaaatcaggtgaatcctacaaaatgatggaagaatgggcacttgcggcaaaaagttggcaagcggacattacattaattccatttcaagatgaagctctggtagatcgtaggctgcgtgagggtaaatgcgatgcagcttatatgacttcaatgcgagcacgaaactacaataaatttgcaggctcgattgatgcgattgggggcgtgacaagtaatgctattgctcaaaaggcaattagttacgttttagatcaacgtaataaacatcgcatgctaaccacacaaaatggaacaaactatgaggtggttggaattgtccagattggactagcatacttatttgtaagagatagaaacctcaactcaattgagaaagtacgtgggactaagtttgctattttgcaatatgacgcagcccagaaaattatggttgaaagtgtaggtgcccagcctattccttctgagattaccgattttgtgaaaaagtttaatagtggccaagtcgaggcaattgctgcacctgcttatgcttataaacctttagaaattggtaaggggattggagcaaatggagctatgtttacttttcctgtggtgaacgtcacaggggatttaattgcaagaagtgataagtttccggccaattttggaatgaagtctcgtgaatggtttattaaacagttgccacagaacttcgcaatggtaaaacggttagaaaccggtattcctcctaaaattaaattaaatttttcagccgaagataaattgaaatatcagaaaatattacgtgaaggtcgccttggcttaacaaaacaaggtgtatatgacgcgacaatgatgagtgtactcaagcgcgcacgatgcaccattgaacggacaaattttgaatgtacgcttacaggagagtagtttgttttttgatcacaaaaaccctacagatatttcaaagctgaatatgggtatgaaaattgtgaatataaaaaataacttacggaaaattagcgatttttcattttaataaataatttaaatcgaacaaacaatggttcaatgagataaaaatatttgagtaaaagctctatttttttctaaaaaacatgattaatatctgtgtttgaaaggaaacttcaaacaaaaaatctgttccgtggaaggatgaagaaaatgaaaaaaatcgtacttgctatggctgccgcttctgttgttggtttttctgcttcagcgcaagcagcgagtaccgtgtgtgtattcgacctcttaggaaaagcaggcgactcatataaaatgatggaagaatgggctctagctgcaaaaggctggggtactgaaattaacttagttcctcgtcaggacgaggctgttgcagataatgatttcaaagctggtaaatgtgatgccgtagcaatgacagctatgcgtgctcgtcaatataacaaatttgccggatcaatcgactcgcttggtggcgttcctaataaccaaattgcacaacgtgctattacttatgtattagatgcacgtaacgctgcaaaaatgacaactaaccttggtggtaaaaaatacgaagttgctggtatctctccgttaggttcagcgttcattttcgtacgtgataaaaacatcaactcagttgaaaaagctgctggtaaaaaattcgccgtgttaggttatgacgatgcacaaaaaattatggtgcagcgcgtaggtgctcaggcagttctttctgatatttcaaactttgctgctaaatttaataatggtcaggtagatatggtaggtgcgcctgcttatgcatacaaaccattagaattgaacaaaggtttgggcgcaaacggtgtaatgtggaacttcccggtattacatgtaacggctgatttagtattgcgtgctgataaattcccagcaggctttggtcaaaagtctcgtgattggttcgtaaaacaattaccaaaaagctttgcaatgattaaccgtttagaagcacaaattccaggtaaatacaaaatgaacctaagtgctgaagacaaactgaaatatcaaaaaatgttacgtgatggccgtatggatttaactaaacgcggtatttacgatgcaggtatgatgtctgtattgaaaaaagcacgttgttctgtagacaaagctaactttgaatgttcaatgcctggtgaataattcattttgaacttaaaagcctagatttattctaggcttttttgctttctaaaagctgtcaattcagccattgtgattcattaaaaaggcgctaatctaaattgaggataaaacttcatctggatatatgaagatattagaaaatagaacaaggaagtgagtcattaaaagagctaagggaatttaactcgttattttttattgagctcggataaacagaattgatcataaaaatatctaaattgtgaatcttagatgaagcatatctcatgagaatcatgccaaccagcgtgaaatttcttgatgccaaaaacaaaaaatttacaaggaaaggaaaagaatatgcgattttccaaaacgcttttacttgcgatgggactcacaacaatttcatttgcagccgaggccaaacaaaccatatgtgtttttgactttgttggtaaaaatggcgatgtctatgcactcatgaaggactatcagcttgcagcgaaaaactggggagctgatatcgaactaaaagtaaaccagaatgaagcagtgattgctgaagattttaaagcgggcaaatgtgatggtattagtgtatcaggcatgcgcggacgtcaattcaactcatttacgggatcattagatgcaattggcgcgattccagatctcaaacttgctgttaaagtcatgcaaggtttagcgagccaaacctttagtaaatatatggtcaatggccgctatgaggtagtaggtgttattccggtaggagatgcttaccttttagtaaacgaccatagtattaataccgtagcgaaagctgccggtaaaaaaatcgccgtattagactacgatgaagcacaaaaaattatggttcagcaggtgggtgctcaggcagtgagtgcagatgtgactaacttcggggccaaatttaacaatcatcaggtcgatattattggtgcgccagcagcagcttttaaacctttagagttacaaaaaggcttaggtacaaaaggggcaattgtaaactatccaatcttacaggtgaccggaaatattattattcgtccagacaaattcccagctggttttggtcagaaatctagagagtgggtggctggtcagttaccgcgtgcttttactatcttgggtaaaatgaaagcggatattccgcaaaaatattggatggaagtaccagctgccgataaaccgggttatcaaaagctcatgcgtgaatcacgaattaaccttacacaacgcggggtgtatgataaacgcatgatgaaactactatggcaattccgttgtaagcaagacgcgaaaaactttgaatgtggcttacaagatgagaattacaaataatcttgataaaaatactcaagattcgctttaaacttcgaagacagaccctatattgattatgctatactcaatatagggtcttttttattttgaaaggcacagcaaaatccgaggaacaatcatcatgaatgcccaagctctagttttgacagataatgctgccaataaggtacgccaactccgtgatagtgaagggaatgacgatctcatgttacgtgtatatgtaaccggaggcgggtgttcagggttttcatacggcttcaatttcgccgaaagcgtaaatgaagatgatgctgaatttgtaaatggcgatgtaaagatgctggttgactcgctcagctatcaatatttagttggctcagtggttgattatgttgaaggccttgaaggttcacgctttattgtgcagaacccgaatgcgacaacaacctgtggttgtggttcttcattctcaatttaaaaagaattttaaataaaaaaaacctctctatgatgagaggttttttatttataagattatgcttgatcatgtatagattctaaaaagcattgtacgagttcaggggcattttgataaggaatccaatgagaggcatccataaaaatagccttataattatttttaaaataacctgaatttaacttggcacttttttctgttactgcaatatcatgcttaccccaaataaaaagagtgggaacgtctattgctttaaaaggattttcaggtttgtcccaaaaaaagccacgataccagtttaatgccgtagttagcctattttcttttataaactcagtctcgaatatttcaatttgctgctcggtcatgccagatgacttaagaaagttacggcctaatttaggcatctttttaaataaaagttcgggcagaataggaagctgaaaaactgcaaaataataagattttagtagttgattgctacttaagcaggcttttaaaaaagcagcttgatggggtacggaaactaaagtgagatgttgaatatactgcggatacttcatagctacactagacgcaattacagaaccccaatcgtgcccaattaaataaactggttgaccaagtcccttaataaaaactacgacatcttcagttagttcacttaaagcgtaatgaaagcggctttgtggtctagcatttagactataaccacgttgatggatcgcaaatgttctaaattgatgctcatgcaataattccgaagtctgctcccaactatgggcagtttctggaaagccatgcaataaaaccacgagagggccatctatagggcctgaatcaatgacatcgaatgtccaagccccacgtgtgtattgatgaatacgtttggtcagatccataacaatatgccttacttatttttgttggcatttatcatgaatttttatgaccaatttaataacagcatttcgggtcaggaaatgtgttatgaggtcgaatcagtccaattaaatcgaataagtagctttataccgccgtgatcgtgcctaagattctaaaatctgaagctcctgttaccgcaggtaaattaccacttaaaccatccacaaaacgcattgctaaccatgcaaatgctgtagcctcaacccaagtaggggagagtcctaaaacatcagtggtttgaactgaccaattgtgcttacgtaagcgccaacgtaattgttctaacaaataggagttataagctccacctccacatacataaacttcacctgtttccatattagaacgatagatcgctttttgaatggcacgtacagtaagttttaataaggtagcttgaatattttcaggtgtatcttctaactcatcataagttaaatcattacgccaatcgattaactgatcatctaaccagtcaatattgaaatcttcacgtcccgtacttttaggtggctctttagaaaaatactcatgagcataaagacggtcgagtaaagagcgaataggatgaccataagctgcccaatcgccattttcatcatatggatgacctgtatggcgatgacaccatgcatccatcaaaatattggcaggtcccgtatcaaacccaaatacgctgtcaggattattggcaggcaacatgctcacattggcaatgccacccaaattcaaaatcacccgatgaatgcttggatgttgaaataatgcctgatgaaatgcaggcactaatggagcgccttgaccacctgctgccatatctctacgacgaaaatctgaaacgaccgggatttgagtgatctcagtaataatgtttggatcgccaatttgtagcgtaaaaccatgctctggacgatgacgaatggtttgtccatgcgacccaatcgctttaatttgactacgatctaattggtgcttttcaatgagagaattaatcccatgaccaatcattttggctagagcaacatcagctttacccatgcggtcaatttcattgtcatcgggtaaagttaatgccataagctcatcacgtaactcgggttcgaatggaactgtaagtgtggcatgaagctgtagaggctcaaatgaagccgcaacaatatccacaccatccatactagtgccagtcattacgccgatatagattgcgctcatatgcaacttcccctgcaagacgctgaaaaaatgttagtatatcgcacaaattgaataactgatgtgtttaggttttgtgatgtcaaatttcttgcccgccgaagaacagcttgccctcatccaacgaggcacgcacgaaattatttcagaagaagatttactgaaaaagcttaaagagaatcgtcctcttaaaattaaagctggttttgaccctacagctccagatttacatttaggacatacggttcttattaacaaactaaaaacgtttcaagatttgggtcatgaagttactttcttgattggcgactataccgccatgattggtgacccaacgggtaaaagtgcaactcgtccgccgttatcacgcgaacaagttgaagctaacgctaaaacttatcaagaacaagttttcaaaatcttagatccgaataagacaaaagtacgttttaattcagagtggtttaaccaaaagtctgctgcggatcttattcagttggcaagccagcaaacagtatcacgtatgttagagcgtgatgacttcactaagcgttataacaatcatcagccaattgcaattcatgagttcttatatcctttagttcaaggctatgactctatcgcacttgaagcagacgttgagttaggtggtacagaccaaacctttaacttacttatgggccgtacattacaaagccgttatggccaagaatcacaagtatgtatcactgtaccaattctagaaggtttagatggcgtaaataaaatgtctaaatctttaggtaactatattggtgtttttgatgcgccaggtgcaatgtaccaaaaagtattatcaatgcctgactctttaatcgaacgttatttcgatttattaagttttaaatctctagatgagatcaaagctttattagatgaaatcgcggctggtcgtaatccacaagaagtaaaacgtattcttgcactcgagttggttgaacgcttccatgatgctgaagcagctgctaatgctcataagagtgctggtaaccgtattacagaaggtgaggtgccggcagatactcctgaagtaactatttcacgtggtgagtttggtggtgaaatctttattgccacgattcttcgcgtagcaggattaaatccaaatgcagcagctgcaaaagatgctgttgcacgcggtgcagtaaaagtagactggaatgtagtagatgcaagtttctctgtaaaagaaaacgggactttcattattcagtctgggaaaaaagcaattgcacgtgtaactttcactgactaaaagttatgtagtgatagaaaagcaggagtaatcctgctttttttattttagaaccataaaaccaattaagcgttccacgtggaaccatctaagtattattaagaataaaataaattaaaaaataagaagaaatataaagtgagggtagagtatttactctaatatttctttggattctttggattctttggattctttggattctttggattctttggattctttggattctttggattctttggattaaaaagcttatagaggaataaaaaccatataaaagactccctaacttcaaaatgattatatagctaaagataaaaaccaataaaaaaatagcaaaaatgcctaaaaaaagccatatatatcacttttttcgcaaaatagtagaaaaaaacggcactcaagtgaaaaagggataaatacccttggcaagggaatgagatggtctataatgcacatccatcggcggtgatgcagatagaaacttgttgaaaaacagttacttgtgattagattggttgctttaagtgatgaatttgatggtaagttggtttagagaataagttttaaaaatatcgaaattacctgttgacttttaagagattaagagtaatatagtcgacctagcttgctggtgacgaaccagtaagaagatcattaagagaattgaagaacaacttgtgtggatttttactgattgattaatcgaaataattttcattgattgattggtttaaattactcgaagtttatttgagcgaaatttaagtcagtaattgatgagccagaattggtaccttgtctataaataaggtacaaaatgattttaactgaagagtttgatcatggctcagattgaacgctggcggcaggcttaacacatgcaagtcgagcgggggaaggtagcttgctactggacctagcggcggacgggtgagtaatgcttaggaatctgcctattagtgggggacaacatctcgaaagggatgctaataccgcatacgtcctacgggagaaagcaggggatcttcggaccttgcgctaatagatgagcctaagtcggattagctagttggtggggtaaaggcctaccaaggcgacgatctgtagcgggtctgagaggatgatccgccacactgggactgagacacggcccagactcctacgggaggcagcagtggggaatattggacaatggggggaaccctgatccagccatgccgcgtgtgtgaagaaggccttatggttgtaaagcactttaagcgaggaggaggctactttagttaatacctagagatagtggacgttactcgcagaataagcaccggctaactctgtgccagcagccgcggtaatacagagggtgcgagcgttaatcggatttactgggcgtaaagcgtgcgtaggcggcttattaagtcggatgtgaaatccccgagcttaacttgggaattgcattcgatactggtgagctagagtatgggagaggatggtagaattccaggtgtagcggtgaaatgcgtagagatctggaggaataccgatggcgaaggcagccatctggcctaatactgacgctgaggtacgaaagcatggggagcaaacaggattagataccctggtagtccatgccgtaaacgatgtctactagccgttggggcctttgaggctttagtggcgcagctaacgcgataagtagaccgcctggggagtacggtcgcaagactaaaactcaaatgaattgacgggggcccgcacaagcggtggagcatgtggtttaattcgatgcaacgcgaagaaccttacctggccttgacatactagaaactttccagagatggattggtgccttcgggaatctagatacaggtgctgcatggctgtcgtcagctcgtgtcgtgagatgttgggttaagtcccgcaacgagcgcaacccttttccttacttgccagcatttcggatgggaactttaaggatactgccagtgacaaactggaggaaggcggggacgacgtcaagtcatcatggcccttacggccagggctacacacgtgctacaatggtcggtacaaagggttgctacacagcgatgtgatgctaatctcaaaaagccgatcgtagtccggattggagtctgcaactcgactccatgaagtcggaatcgctagtaatcgcggatcagaatgccgcggtgaatacgttcccgggccttgtacacaccgcccgtcacaccatgggagtttgttgcaccagaagtagctagcctaactgcaaagagggcggttaccacggtgtggccgatgactggggtgaagtcgtaacaaggtagccgtaggggaacctgcggctggatcacctccttaacgaaagattgacgattggtaagaatccacaacaagttgttcttcatagatgtatctgagggtctgtagctcagttggttagagcacacgcttgataagcgtggggtcacaagttcaagtcttgtcagacccaccatgactttgactggttgaagttatagataaaagatacatgattgatgatgtaagctggggacttagcttagttggtagagcgcctgctttgcacgcaggaggtcaggagttcgactctcctagtctccaccagaacttaagaaaagttcggattacagaaattagtaaataaagattgagatcttggctttataacttctgtgatttcattatcacggtaattagtgtgatctgacgaagacacattaactcattaacagattggcaaaattgagtctgaaataaattgttcactcaagagtttaggttaagcaattaatctagatgaattgagaactagcaaattaactgaatcaagcgttttggtatgtgaatttagattgaagctgtacggtgcttaagtgcacagtgctctaaactgaaatgttgaagttactaacttgtaggtaacatcgactgtttggggttgtatagtcaagtaattaagtgcatgtggtggatgccttggcagtcagaggcgatgaaagacgtgatagcctgcgaaaagctccggggaggcggcaaatatcctttgatccggagatgtctgaatgggggaacccacctactttaaggtaggtattgcaacatgaatacatagtgttgcaaggcgaacgaggggaagtgaaacatctcagtacccttaggaaaagaaatcaattgagattccctcagtagcggcgagcgaacggggatcagcccattaagttatgtgtgttttagtggaacgctctgggaagtgcgaacgtagagggtgatattcccgtacacgaaagggcacacataatgatgacgagtagggcgaggcacgtgaaaccttgtctgaatatggggggaccatcctccaaggctaaatactcctgactgaccgatagtgaaccagtaccgtgagggaaaggcgaaaagaacccctgtgaggggagtgaaatagatcctgaaaccgcatgcatacaagcagtgggagcaccttcgtggtgtgactgcgtaccttttgtataatgggtcagcgacttatattcagtagcaaggttaaccgtataggggagccgtagagaaatcgagtcttaatagggcgtttagttgctgggtatagacccgaaaccaggcgatctatccatgagcaggttgaaggttgggtaacactaactggaggaccgaacccactgtcgttgaaaagccaggggatgacttgtggataggggtgaaaggctaatcaagcctggtgatagctggttctccccgaaagctatttaggtagcgcctcggacgaataccatagggggtagagcactgtttcggctagggggtcatcccgacttaccaaaccgatgcaaactccgaatacctatgagtactatccgggagacagactgcgggtgctaacgtccgtagtcaagaggaaaacaatccagaccgccagctaaggccccaaaatcatagttaagtgggaaacgatgtgggaaggcatagacagctaggaggttggcttagaagcagccaccctttaaagaaagcgtaatagctcactagtcgagtcggcctgcgcggaagatgtaacggggctaaaactatgtgccgaagctgcggatttgacattagtcaagtggtaggggagcgttctgtaagccgatgaaggtgtattgagaagtatgctggaggtatcagaagtgcgaatgctgacgtgagtaacgacaaaacgggtgaaaaacccgttcgccgaaagaccaagggttccagtccaacgttaatcggggctgggtgagtcgacccctaaggcgaggccgaaaggcgtagtcgatgggaaaatggttaatattccattacttctgtgtaatgcgatgagaggacggagaaggctaaatcagcctggcgttggttgtccaggtgaaaggatgtaggcatgtatcttaggcaaatccggggtactctatgctgagatctgatagcaagctgtacttgtacagcgaagtggttgatgccatgcttccaggaaaagtctctaagcttcagttacacaggaatcgtacccgaaaccgacacaggtggtcaggtcgagtagaccaaggcgcttgagagaactctgctgaaggaactaggcaaaatggtaccgtaacttcgggagaaggtacgctgttgttggtgatggaactcgcttcctgagctgacgacagccgcagaaaccaggccgctgcaactgtttattaaaaacatagcactctgcaaacacgaaagtggacgtatagggtgtgatgcctgcccggtgctggaaggttaattgatggggttagcgtaagcgaagctcttgatcgaagccccagtaaacggcggccgtaactataacggtcctaaggtagcgaaattccttgtcgggtaagttccgacctgcacgaatggcataatgatggcggcgctgtctccagcagaggctcagtgaaatcgaaatcgctgtgaagatgcagtgtacccgcggctagacggaaagaccccgtgaacctttactgcagcttgacactgaactttgaccttacttgtgtaggataggtgggaggctttgaagctggaacgctagttccagtggagccgtccttgaaataccaccctggtaatgttgaggttctaactctgtcccgtgatccgggacgaggaccgtgtctggtgggtagtttgactggggcggtctcctcctaaagagtaacggaggagtacgaaggtgcgctcagcgtggtcggaaatcacgcgtagagtataaaggcaaaagcgcgcttaactgcgagacccacaagtcgagcaggtacgaaagtaggtcttagtgatccggtggttctgtatggaagggccatcgctcaacggataaaaggtactctggggataacaggctgataccgcccaagagttcatatcgacggcggtgtttggcacctcgatgtcggctcatctcatcctggggctgaagcaggtcccaagggtatggctgttcgccatttaaagaggtacgcgagctgggtttagaacgtcgtgagacagttcggtccctatctaccgtgggcgctggaaatttgagaggatctgctcctagtacgagaggaccagagtggacgaacctctggtgtaccggttgtgacgccagtcgcatcgccgggtagctatgttcggaagggataaccgctgaaagcatctaagcgggaagcctacctcaagataagatttccctaggactttatgtcctctaaagagccgttcgagactaggacgttgataggttggatgtggaagcatagtgatatgtgaagctgaccaatactaattgctcgtgaggcttgactatacaacacccaagcagttgtatatgaagcatcaatcgattcttaaatatgcaagacaacttgatttagttatacctctagctaaaatgaacagataaagtaagattcaattcagcccagtctgttacagatttggaaaacgcttcggcatcaagtaagacccaagcaagtatccataaacagttgtgctggcgaccatagcaagagtgaaccacctgatcccttcccgaactcagaagtgaaacctcttagcgctgatggtagtgtgggattacccatgtgagagtaagtcatcgccagctcattattctaaacaccccaatctcaaaagaggttggggtgtttttttattgcaggtaaatcaaaatattatggaagtgttgtgttataaacaataagaaaattatatatttaaatatgcagaataagggggtaagtacctatgataatctatggtgatgtagattcaggtaattgttataaaatcaaactgttactatccctattaaatatacatcatagatggattcatgttgatattttaaataaagatactcaaacagcagagtttctatctttaaatcctaatgggaaaatacctgtattagttttagatgatggacgggttctaagtgagtctaacgctattttaggctacttggctgagggaacggaattgattcctgcagatccttatatgaaggcaaaaatgtatcaatggatgttctttgaacaatatagccatgaaccatttattgcagttgctcgttttattaataaatatctaggattaccgccagaaagaatagaggaatatcataaattacaacccaaaggccataaagcattatctattatgaataaagctttagtagggcacgactatcttgttggaaataaatttacaattgctgatattgctttatatgcatacacgcatgtagctgaggaaggcggcttcgatttaaagttatacccaaatattcaagaatggtgtcaacgaattcaaaaatatccaaaatatgtgagtatggttgaataaaaaagaactcttatagagttcttttttatatggggaagatcaaaattctgttttaatttagaaatgtgcttctaagcccacataaggccctttaaattcaaatttaaggtcattgttatcgtaatcatctaaatcgatattgaggatacgataaccagctgttaagcctaaatcgattaataaattatcggcaaacttatactttgcttctactaacgcatctgtaatttttgcatcatcaaagtttgtatatgttgcttcacctttagcgcttaaccctgtaaatggaagttttacttcacctgataaataagcaatcggatatgtcttatcaatatctacacgtttaccggtataggcagtaatatctccatttagtacagttgcaccaagacctgcatctacactgacaatattatctagtaactcatagtagagaataaaatcactatgatctaaatcaacgttatagttagcttgacccaaagtttctgatttagtttgagtatctaaattaacataacgaatttttgcatttggaataaatgggattgggtgctcaaaagctaatgaaagttgagcactaccttttcggtctagatcttgatcttcaggagattgtgaagacatattagctttgccgtcataaaaccagtagccaacgtctccttttacgcctataaaatctgcttgtgcgaatccgctaagacccatcccgagtgctaaaaaagacagttttaatattttcatcatcaatcctaaaaaaaagaaaatctttgaacgcatgatatagatatctttgcagttatgcattgatgaaaaattgtgaatataaagcttctatatcttcaatttttaatattcttttatttaattgattttcatataaaaattaataacttatagtgatttgagttttagaggttttagtataaattttgtgtaagtgatcgataatactttgatattttactcatctacaaattagttgatatatctactttatggatgggaataaaattttaatggtagaaaatatcattgaatgtaagaaggtaataatatgctttaaaacaggaatattagctaaaaaataaccaatctagataagaatctctaaaaaaacgtaaattttcagacggaaattacagtaaaaagaaataaaaacaggtattgttcagctatataggggcaaaaaatggacaaaaatctttaaggaagaattttctatttttgcttgtttgttaagggaataaaaatactcaaaaggtgcattttattttctacaaacacaaaagtattttttggttctttttttgcatgcggaataacaatcaacaatagcagtaaaaataagtaatcttttaacattaggtgttctatgacagatactcgtgaaaactggacgtcacgatctggttttattattgcagccgttggttcggctgtaggcttaggtaatatttggcgctttccatacgttgcgtatgaaaatggcggtggtgcgtttcttattccctatctattagcactcattactgctggtttaccgctattatttttagattatgcggtaggccatcgtagtactggttcacctcctaaggcatatcgtgccttatttaaaggtggtgaaacattagggtggtggcaggtttgtgtctgtatcatcattggtttgtactatgcaagtgtacttacatgggctggtagctatgtttacttctctattggtcaaatgtggggaagtgatccggaaggtttcttctttaatacctatttgcagaccacaaaagcaaccggctttgatctacagtttgtaggtcatttattctggccgattgttgggatttgggcacttactctcatcattctttatggtggtgtgaaaaaaggtgtggaattatcgaataagattttcatgcctttattattcattctcttcactattttagttattcaatcgttacgtttaccaggtgcggtacaaggtttaaatgcattctttacaccgaactggtctgcaatgatggattataaagtttggttagctgcctatggccatactttcttttcactctcagttggtttcgggatcatggtgacctatgcatcctatttaaaaccaaaaacgaatttaactggttctggtttaatcgttggttttgcaaatgcatcaacagagattttagcgggtattggtatctttgcagcgcttggctttatggcacatgccgcaggtactgaagttaaggatgttgtgagtggcggtatcggactcgcatttattgctttccctaaaattatttcaagtttaggttctggtgctgatctattcggtcttttgttcttctcttcattatttgttgctggtatttcttcaatggtcagtattttggaagtgcctattgcagcaatgcaagataagttaaagtggggacgtaagaaagcggtaacgattattggtggtggtagtgcactggtttcaattattttattctcaagtgtaaacgcaattaagctcgttgatattgttgatcactttattaataacattgggattattggtggggctttattatcaattattagcgtagcttggtttaaacgttcagcacttaaagagcttcgcgaccatgtaaaccgtatctcaaccattcaattgggtaaaggctgggacttcactttaacagtcattacctctttaatcttattaacaacactctgtatgactgtttttaatttgatcaaaaatggctatgatacttatagtatgagcttacaaggtgtcttcggctggggcagtgtgattttctgtgcagtcgttgctatcgtgttaagtaaaatgaaagatcgctaggaggataaaataatgaatacttcggcaatcgtgatgttaataatttcgatggtatttgtatggggtggattagcactatccatcttacatttaacaaaacatcctgaagagttagatgaagttttagaagaagtaaaagatcagcatacgctttgatattctgatctagtaaaaaagcaggcataacgcctgctttttttatgtaatcttttgaattttacaataataaaatccatcaccagattgtgcttctggcaacagttgtctgccatgaacttgttcaattccccaatctgcctcgattttcacttcttttgcatcaggatgttctgtgaagaagttaatcatctgctgttcgttttcagattttaaaattgagcaggtgatataaagcaatgtaccgccaactttgagttgctgccacatgtgctctaagatctgcttttgtagctcaatggtttgggctatgtcactagattggcgcaataggcgtatgtcaggatgacgtcgaatcacacctgtcgcagaacaaggagcatcaagtacgatacaatctacaggttgaacaggagtccacttggttgcatcggctgccaaaatttccgtatgactttgatcgagtgctaagcgatttaagttttcagtcacacggactaaacgactggggtcctgatcaatggcgatgagctgtgctggtttaaacttttcaagcaaatgagccattttaccccctggggcagcacaagcatcaataaccgttttattgtttaaatcaggcaacaaggtggcacatagctgtgcatgttcatcttgtacagagaaccagccttgttcaaaacccggtaactgagtgatttgtacagattgctcaaggacaataccagcttcggaaaacaaacacgcacgtgactgaatgtctaaactttgtagttttgctaaataagcatctcgaccaatatgacgctggttcacccgtaaagttaaaggcgcggcttgctttaacgattggcagagagcttctgtttgttctccccaatccttttttaaccgtttaaaaagccaacttggtaagccatgtgcttgctgtaaaccttgttcaaagtcttcagtttcacgagttgctcgacgcaaaattgcattaacaataccactgagtgcagggaaaccaagttgtttagttgcatcgactgtttccgagatggcagcgtgcgctgcaatacgcgtgcataaaacttgataaaggccaacgtataggcaggtttctacagtctcattgtttaaaggtttgctgagtaaaggcaggctaattaacttaagtgcgaaccattggcgcaatgtacctaaaacaagttcatgaaatagtgcacgatcacgctctgctacttgattcagctgtgtatttaaaatactagcgagcgattgaccttgctgaacttttagcaaggtctggacgacttgagcgcgcaggttaaaacgtgatgaatttgaagtaacctgactcatggcagaatctgtcctacgtgaagtttttgagtttgtgcaatttgttgagcatttaatgctttaccacccggccactgcacactcgttaaacaaataaatgtattttcaccgcaagcaacatgtacgccctgtttatcgattgcaataatttcaccagctttagcatctgctttattttgattagaaattgttgaataccaaacacgcagcgcattattttcatcaagttgaataaaggcaacaggccatgggttgaatgcacggatattgcggtcaacttgaactgcattcatagaccaatcaatacgagcttctgatttcacgagtttatgcgcatagactgttaagctttcgtcttgaacttcgcgttctgctaaatatttttgtagagtttcttctgactcaagtaccgcacaaattgctgttgcaccttgagctgcaagtttgtcatgcaacgtcgctgatgtatcttcggaagtgattggacaataggttttatacatcatatcgcctgtatctaaacccgccgccatttgcatgatggtgataccagtttcgtcgtcacctgttgcaattgcacgctgaatcggtgctgcaccgcgccagcgtggtaataatgagccatgaatatttaaacagccatatttaggtgtatcgagcacagcttgtggaagaattaagccatatgctgcaactaccatgacatcagcgcctaaagcagcaagttcttgttgagctgccaagccttcttcagttgaagctttgaagtgaagtggttgataaacaggaatattatgttccagcgcaagctgttttacaggagacggtgttagtttttgtccacgacctgctttacggtctggttgagtataaaccgcgataatttcatgggaagtttttagtagagccgccaatgctgttgcagcaaattcgggggtgccagcaaaaataattttcacaaatgcaatccaaaaaaagtttaacgctagtatacgtgaaaaacgattgaagccctaaatcgaagtacaaaggagagctaaagccataaatagtgaacaaaaaattattcaaaaacttttattgataaaaaaaggttataaaaaataaaaaattattcatgtaagttttgctaaatattgactgagtattatcgttcttggctttcccaatattatttgcttctatagaatggagaatgatcaaattatgatgatgagtcaatattccgactgatctaacgctatatcagtatcattcagccagagtggaagtcatttcactcaagcacaacttgttggaaacacaaatgcctgactatcgttcaaaaacatcgacacacggaagaaatatggctggcgcacgtggcttatggcgtgcaacaggaatgaaagatgaagatttcggcaaaccgattattgcagtggtcaattcatttacccaatttgttccgggccacgtccatctgaaagatttaggacagcttgtcgcggcagaaattcaggcagcaggtggtgttgctaaagagttcaatacaatcgcggtggatgacggtatcgcaatggggcatgatggcatgctttattcattaccatcacgtgatttaattgcagactcagttgaatatatggtgaatgcacattgcgccgatgcgatggtatgtatttcgaactgtgacaaaattactccgggaatgttgatggctgcgatgcgtctaaatattcctgtggtgtttgtgtctggcggaccaatggaagcaggtaaggttaaattccgcggtgatgaaaaagcaattgaccttgtagatgctatggttgttgcagctgatgacagctacacagacgaagaagttgcagaatttgaacgttcagcatgtccaacctgtggttcgtgttcaggtatgtttactgcgaactcaatgaactgtttaacagaagcgctaggtttatcgttaccaggcaatggttctatcgttgcaacgcatgcaaaccgtaaaaaattattcttaaaagcaggtcagcttattgttgaattggccaaacgctactatgagcaaaatgatgcaagtattttgcctcgttcaattgccactaaagctgcttttaaaaatgcgatgacacttgatattgcaatgggtggttcaaccaatacagttctccacttgttagctgcggcaaatgaagctgaagttgactttacgatggatgatattgatgagttgtcacgtcgagtaccagtgctttcaaaagtagcaccagcaaaacaagacgtacatatggaagatgtacatcgtgcaggcggtatcatggccattttaggcgagcttgatcgtgcgaatctacttgatgtatctgtaccaactgtacatgagaaaacattaaaagatgcgttagataagtgggatattatccgtactgaagatccagatgtatatgagttctatcgctcatctccgggtggtgttccaactcaagttgcattctcacaaaaccgttactactcaactttagatggcgaccgtgaaaagggtgtgattcgtaatgcagaacatgcattctctaaagatggtggtttagctgttctttacggcaacattgcgcttgatggatgtattgtaaaaactgcgggcgttgacgaatctattttaaaattcacaggttcagcacgagtttttgagagccaagatgcagcggtagaagcaattttaggcaacgaaattaaagctggtgatgtggttgttattcgctacgaaggtccacgtggtggtccgggcatgcaagaaatgctttacccaaccagctatcttaaatcgaaaggtttaggaaaagactgtgcgttagttacagatggccgtttctctggtggttcatcaggtctttcaattggtcacgtttcgccagaagccgctgaaggcggtgcgattggtttggttgaagatggtgataccatcgaaattgatattccaaaccgtaccattcacttgaatattgatgatgcgactttggcgcaccgtcgtacaattcaagaagcgaaaggttggcatccgaaggaagaacgtaaacgtaaggtatcaaaagcgttaaaagtttatgcaatgcataccacaagtgcagcaaaaggagctgtacgcgttctataaaatattcaattttaataattgagtaggaaacatgcacccattaacacgatgaattgttatcatgttaagggtgcattttttatgtctggtaaaaaaaatccgcttgtagaaaaaggtggtttcagatcattctatgggtttgccataaaatggtgataaaatcttcacctacgcagaaactcgcgaaataacatgacatattttctgcgcgaactcaggtagtcatttttccatctcgactactgtttcaccttgcactatgatcaaaataacttttgatctcgcttaggatttatttttagaggcactactcatgtcactgctacgccgttggtttgaccctatccgatcgagctggttttaccaaaagccatctcgtcaagcggtgttacccacggaaaatggtttaagtatttatttacgacttgatgatgtgtatagctatctggctgttcagcaattgtctcagctagatgaaattttaagtcatgaacttaaacctttaaaaattattatttcccatacggcttctgaacctccaaatagcatgacgcatgaggagtggcagcattattgtttaaatgatgccaaaattttagcaaatcagcaccggtttgcttttgatgagtttccagaaatcccaagtccagaatctttaaaacaagccgctgtcatattaaaaagaaccccactacaaggtcagaacttcttacatttacttgaagatatctttcacatgctttggcaacagcaatatggaaaattgcgtactctacatgccatggcagtcaagcatcaggttcctcagcattttccagaacgtatttttacggatgaacctgttcgagcggcatactttgagtttggtggacgtaaatatcatgcagtagatgatttattacgtttaacccgacgtttaaaacaacaaaagttactgacaggtaatccgatatttttaattaatcatatcgaatggcgtgaacatttgattaatgatgctgaggcgttaaatgaaattcaggctttgcatcctgaacttgatgtatttatcgctttagaagacccgatgagctggttgttgcttgcctatattaaagaagagctcgcagactattatgatattcagctaaaagtttatcctttgagttatcggggccgagactggtttgactggagcttggcaacacgtgtgtctaaacgtaccgaggttgcttttacacctttttgccgacctacagaagaaagtacgcttgggatggcaaagcttttctatagtgtgccggaaaatcagcaacttgatacaattttcactattttgcaggctgtttggacgaaaggaaaagatctatctttccagaagcatttccaacagttacagcagcaactgggtattgagcagttaactgaacaggatatacagtcggttttagcgcaaaatgatgcactttgccaagacaagcatcaacctgatttgccggttttagagttgcgtatcgatgggcaaagctatgtatttaatagcctgtatcgggtttggatgattgaaagtatttttagcaatgttttagaagaaaaatacaaaacggcctcaacttctaattgaggcctactcctaaaaacaagaatagggcaaagcctgttttttccgtagcataaccttgtagggaatcggagataaacagtgacatttctagcaattattatgatggtgtttgcctttgcgggcatgattaaaggcatgatcggcttaggcttgcctgcggtatcaatgggcttactcaccatcgcaatgagcccttttcaggctgcatctcttttaattgttccttcaatggtcaccaacgtctggcagctttttgccgaaggacatgtctgggcttttattcgccgtttctggacgttgctcgcaggtattgtggtgggctcaatatggagttttctacctaccttaagtcaaagtcatggtcaaagtagtgaaattttattaggctgcatgttggccttatatgggctttatggtctatgtgtgaagaaacttccgcatttaggaaagcatgagcgctggttatcacccattattggatatatcggtggggcagtgactgtagcaacaggcgttattattattcctattgtgccgtatttgcagtctttgcatttaaaacgtgatgagttggtacaggctttaggattaacgtttacggtctctaccatttgccttgctgtgtttttacaccataacccgatgtcagggataacactggactatcgtttatctttcgctgcgttgttggctgcgctcattggaatgtggatcggtaaaaaaatccgctatcgactgaatgagcagatatttcgccgtatcttttttataggcttgatgtcattaggactttatatgattttgcattaagtcaatttttaaggacgatgctgcgataaaaagtctgcaaactgttggtaactactgggcaactgattgaaactttgtgtggccaaaagtagtttacggtttgcccatgcgcctagcagttgaattgaatggaaatcatagtctgattgtaggcgctgtgcagcacgggcaggcataatcgcaattcccacacctttggcgactacctcggcaattgcgccaaagttaggtaagcgcaaccgatactgtatgttaaaacctaataatttggcttgggtttcaatggactgttgtaaagagtgatgcgatttgagtccaataaaaccatagcttaaagcatctactaaatttagctctttgtagcggactagctcatgtgtcacagggcaaataagaactaatgggtcgcttgcaaactctttagtttgtaaatgtcgggtattgaaaaaactcgagactaggccaagacttgcaatcccttgggttaatgcatctacaatttctgaactttctgcttcatgcaaatcgatattcatttcgggatgaagcactagatattgcggtaataacgtaggtagatattcactttgagcggatgagttacaccaaagtgttaatgcttctgttgtcggctgtctgaaccgctgcatttcttgttcgagttgatctttttgagctaaaagctgacgagcatgttctacaaatgcatgtccagctgtagtgagttctacacctgtggtttggcgaataaataatggggtttcaaaatactgttcaagtttttttatacgttcactcgctgcctgaagtgaaatcgcagagcggtcagcgcctttggtgaggctaccagtcgagacaatatgaagaaccagctgtaaatcaaaaaaatcaaaacgcatgataggaacgtattgaaatgcaaaaattcatcatactaaatcggaatgaaaaaaggcagcttgcgctgccttttagaatttaggttttatcttttaaactaaacagccagtttaaaataatggctgcaaacgttgctgtaccaataccacctaaattgaaattaccgaacaataattcaaagtttccagcacccaaaataatggttactgaagccacaatcagatttttattgttagaaaaatcgactttgttttcaatccagatttttgcaccggcaatggtaattaagccaaataccacaatagatgcacctgtaaggactgcacttggaatggtactaatgacagcgccaaattttggtgatagacctaagaaaatagcaaagatgcctgcaatcacaaatacaatggttgagtacacacgagtgactgccatcacaccaatgttttcaccataagttgtcatccctggcgcgccaacactaccagaaagtgtcgtagctaaaccatcagcgacaaaggctttgcctaattgtggagttaggttttctccagtcattgcacctaccgctttgatatggcctaagttttctgctactaaaatcagtgcaaccggtgcaataattaaaatagccttagtatcaaaagtaggatgtgaaaagcttggaataccgaaccacgaagcttgtgagatctggctaaaatcgatcggtttacctaaacctagaccatttgtcgcaatcgcatagattacataagccaagatcaaacctaccaatagaagtagacgctgcaataagcctcgtgtaaaaactgcgatactgcccatacaaagtacagtaattaaggccatccacatttcaaaaggttggcctgcaacgcctttaatggtaacaggggcaaggttgagaccaataatcatcacaattgcgccagtcaccacaggcggcataagtttttcaatccagcgtgtacccgtgagcatgacaataaaaccgatgagtgcataaaagataccgcacgctacgatcccgcccaacgcaatagaaagatttggattggcacctgaacctgtgatatgccccgtggctgctgcaacaacaccaataaaggcaaaactcgatcctaaataactaggaacacgaccacctgtaattaagaagaacaggatggtacagatacctgacattaaaatagcaaggttagggttaaagcccatgagtaaaggtgctaaaacagttgctccaaacatggcaaatgcatgttggatacctaaaatagcactttgaactggagggagatattcattggtggagaccggtcgatggtcaacatcaccttggtaaggctgccatttgggaaaccagttggacataaaataagctcattattctttaattggtgcaatgatactctttcttgtaaaagcatttaatctcttgtattgaatatgaaagtgaaaagtaattattttttaacgatcggtataattttataaattctaaatataaggaattaggtgtttttttctgataaaaattaattttatgatttttaaaaaaatattctaaaaaatgaaaaatcgaggaaaatttgataaaaacaaggaattttgcaagtaaaaagcagcacatccgagatgcactgctttaagaaagtagttagtaaaatgagcttagcctgtattacgtaaaccagcagcaattccggcaatacttaccatcagtgcatggtcaacaggggtatgctctgcctgacgttcagcaagataatcacggcggcgtttcatgagttcagcttgtaaaagatgcaaaggcagtaaatacggtttacgaacttgcatagactgatccaaaacttcattgtcgcttaatagttttgattcatcttttaacgtaagcaaggtttccacagcatcttttagacgttggcgtaactgattgccgagcacttttaagtcttcatcttcagtcaaatgagactcgtaatagagtgcaatattggcatcggctttagacaataccatttccagcatatcaatgagtgtctggaaataaggccattgctgaagcatttcatcaagcgttgctttttgctgatcggcaatcacttcattaatcgccgcacctgtacctaaccatgcaggtaacattaaacggatttgtgtccaagcaaacacccatggaatggcacgtaaagactcgataccaccacttactttacgttttgccggacgtgagcctagcggcaacatttgtaattcaagctcaggagtgacagtccgtaagtacttcacaaaatgcgggttttcacgcactgtttgacgataaaccttcacagaatgatctgtcatacggttcataagttcacgccactcaaccttaggctctggtggtggtaataatgtcgcttcaagcgttgctgcggtatagatttcaagattttgcatggcaataccttctagaccgaatttgaagcgaatcatttcaccttgttctgtcacacgaattgcaccagagattgagcccggtggttgcgaaaagagtgcctgttgcgttggagcaccaccacggctaattgagccgccacgaccgtggaacagagtcaactgtacgccgtgtttacgagcaattgcagtcaactcttcttgagcacggtattgggcccagttagcagacatgaaaccggcatcttttgctgagtccgagtagccgatcatcacttcgtgtttgccctgaatgtgctgcttataccagtgcatattgaacagcgtattcatggtagttgcagcgccatctaaatcttttaaagtttcaaacagaggcacgacacgtaaaggatgctgaatacctgcttctttttgcaataataacacagctaaaacatcgctcggatattcagccatcgaaataatataagcccctaacgactcaggcggttggtcagccaaagtacgcatagttgcaaatacttcttgaacatctgggtgaccaatcaaactaccttctggctcattaatatacttcggtagtagcgggcgtttgctttggagttcctgaataaggaagttttggcgcgcttgttcagtccatgactcaaaattacccagacctaagtattcagtaattgctgaaatggcttggcgatgacggcctgattcttggcgaatatcgagcttaagcagttcaataccaaaacagttcacacggtagataaagtcgagtagttgaccattcgcgatttcaggcagattactgtcaattagagagcgatagcacagcaataatggttgtaacagttcatctttgcttttaatgacattgctgtcatcagcttctaagccttgtaggcgctgagctaaccaatgacgagttgcttttaaacgctcacgtgttgcacgtagatactcacgataaggctctggatgaggactaccaatggcttgaaccatttcttcggaacaagactgaattgatagttcccaacgtaagttttcgatatctcttagatagaggtcggcagcttgccagcgtgataaccacaatacttcttgggtaatttgatgagtaacgttcgggttaccatcacggtctccacccatccaagatgcaaaacgtactggagcaatatgaagtggtaagttttgttggcaattgtcttggaccagttcatttagctcacggataaatttaggaacagcattccaaagcgtttgctcaattgtggcaaagccccattttgcttcatctactggggtcgggcgatgctgtctgatttcatctgtttgccaagctgaactaatttgttgttttaaattggcaagagcattttgtcgttcacgcggagtaagtttttgctgatcaagttgtgatagacaagcattgatatcgtcatatttttgaatcagggtacgacgactcacttctgttggatgcgccgtaagtaccaattcaatcttaagatcacaaatttgctggaacagtttttccgtcgaaatatttttatctttaaactttttaaataagtgaacaaggggattcggggagtttgcatctggatcgaactctgcctgtctgcggctacgtaccacatgatattgctcagcaatattggcaaaattgaggaagtgagaaaaagcgcgggtaagaggcaatagctcttcatcgggcaattctaaaaataattgttctaattgcttttcggcttcagcttgaccatcacgtgcacctttggcaagagcacggatttgctcgatctgattaaacagttcttgtcctgcatgctgttttagggtttcacctaataaattgccaagtaagcggacatcctcacgcagtggcgcatcgatttgctgaaccatgctattttctcctgttcttattcttttcgaatatagcgcgattaacgaacattccaagctttgagcgtaagaaaatgtgaatttttgcttaaaaaataacatttaaatcgcttataacgctttaaaagtcgacatgcacccgttgcaaattttggcaatcggactttggtttaatgccgatatctgagtagaaataaatcaatagcatctcgaataaaccgatctatctcttgagcattcggtacaggaataattctaagtagaaccttgtgatggcgtacaccaagcaataaggtcaaaagcagctctgtttgatatagcggatcatcggcctgaataaaacctaattgagcagctttttgaaaaaactcaactaactgattttgcagacgggtatgggatgcgtcaaaaaactgtagggcgagtggactttgctctgctgcaagttcaaataatacatgctcgagtttaagtgcttcgggggaataaataatctgcaaggcacgtgaacacaccatataaagtgtttgataaaagtctgccgatgcatctaattcaaatggtttagtgcctagagtctcttcacaagtttctgtaatggcacagataaacaggtttgctttgtcttgaaagtgattataaaccgtgagtttagtaacgcccgcttcctgtgcaatcaggttcatgctggtaccgtgataaccggactttaaaaaaatagctttagcggcctgtaagatacgagcacgcttttccagatctttggggcgaccactttgattaactgtttgcacgaaaccctctaataaaactatataaaaataaatacttataagttttcctttaattaatgtaccgtcgggtatattaattaaaaaacaaacaaactatgatgcaaatatattgtgccttaaaaaaccagtttgaataagagcgataagatatgaatctgttaaaacctctcatcatgagtatgatgattgtttgcatggtcacattaacggggtgtagtaaagaggctcctaaaacagaagaaataccctatgtgatggtgacccagccttcaaccacacttcacgaacaaaaaagctatgctggagatgtacaggctcgacaacaaactgccttggcatttcgggtgggtggacaagttacggctcgctatgtggatgtaggtgaccgggttagagttgggcaagtattagcaaaactcgatgtggcggatgcacagctacaattaaatgctgccaaagctcaattagaaaacgcacaggcagcagcaaaaacagcctcagatgagcttaagcggtttcaacaattattacccataaatgccgtaagccgttcgcaatacgatacggtaaaaaatcaatatgatgcggctcaggcagcattacaacaagctcgttctaattatgaagtttctgccaaccagactggttataaccaacttgtttctaataaaaacggtgttattacagcgcgtaatattgaaattggacaggtggttgcagcagggcaagcggcttatcaactggcaattgatggtgaacgtgaagtggtcatcggcgtaccggaacaagcggttagcgagattaaagttggccaagcggcatggataactttgtggtctaaaccgaacgaacgatttgccggatatgtacgcgaagtttctccagctgctgaccagtcccgtacattcacagttaaggtggcactcaaagaaggtcagtctgctattcagctgggacaaagtgcacgcgtattttttagttcgactcaaactaatgtcatgagtgtgccactttcgagtgtatctgcaacagataaccaaccttatgtatgggtggtgaatgcgaatcagaccttacgtaaagtgcctgtaacgattggtgcttatggcagagatagtgtgccggtattatcgggtttaacaccaaatgattgggttgtgattggtggtgtgcacttgctgcgcgataaacagaagattcacccgattgatcgtgaaaatcgtgcagtgaaaattcagggagccaaataaccatgaaatttaatctctctgaatgggcactgaacaataaaggtattgtcctttatttcatgctcttgctaggcattattggtgcaatttcttattcaaaactctcacaaagtgaagatccgccatttacctttaaagtcatggtcgtacaaacctactggccaggggcaacagccaaagaagtgtctactttagttacggaccgtatcgaaaaggaactgatgaccacaggtcagtatgacaagattatggcgtattcccgtccaggcgagtcgatggtgacttttgttgctaaagattctctcacttctgcgcaaattcctgatgtttggtacaacgttcggaagaaggtcaatgacattcgccatgaactcccaagtggtgtgcaaggtccattttttaatgatgaatttggcgatactttcggtaatatttatgtactgacaggcaaagactttgactacgcgcttttgaaagaatatgccgatcgtttgcaattacagctacagagagtcaaagatgtaggcaaagttgagctgatcgggctacaagatcagaaaatctggattgaaatttcaaacactaaagcggttcagctcggtattcctgtttctgccatacaagaagccctgcaaaagcaaaatagcatggcaagtgcaggcttttttgaaactggaacggatcgtattcaaattcgagtaagtggccaactacaaagcgtagaggatattaaaaaaatgcctttactggtaggcgataaaaccattcagcttggtgatgttgctgatgtctaccgtggttttagccaacctgctcagccgcgtatgcgttttatgggtgacaatggtattggtattgccgtatctatgcgtaaaggcggcgatattattgccttaggtaaaaatctggaaactgaatttgcccaactgcaaaaaacattacctctaggtatgaaactacaaaaagtttctgaccaacctgtagcggtacaacgcagtatccatgagtttgtcaaagtacttgctgaagcagtcattattgtcttgttagtgagctttttctcattaggtttccggacgggtttagttgtcgctttttccattcctttggttttagcaatgacttttgctggcatgaatttatttgatgtcgggctgcacaagatttcgcttggtgccctaattctagctttgggcctgcttgtagatgatgccattattgctgtcgagatgatggccattaagatggagcaggggtatagccgaattaaggccgccggatttgcatggaaaacaacagcatttccgatgttgacagggacattaattaccgccgcaggctttttacctattgctacggctcagtccagtacaggtgaatacacacgctctatctttcaggtcgtgacgattgctttattggtgtcttgggttgccgcagttttatttgtaccttatttgggtgaaaaactactacctgattttaccaagacaggtcatcaagcaccttggtatgtccgtttatgggcaagaataactaaaaaaccgcaaccgcaaactgtggccatttcacaggaccaccattacgatccttatcaatcgagtttctatttacgttttcggaaaatggtcgagttttgtgtgacctaccgtaaaaccgtgattgcaacaacggtggggatttttgtgctgtctgtactcatgtttaagatggtgccacagcagtttttcccgccttcaaaccgcgctgaaattttagtcgatttaaaactcgaagaaggcgcatcgttaaccgctacagagcaagcggtgaaaaaggttgaacaattcctgtctaaacaaaaaggcattgataattatgtagcctatgtcggtacaggttcaccacgtttttatttacctctagatcagcaattaccgcaagccagctttgcgcagtttgttgttttggcatcatcgcttgatgatcgtgatgaaattcgccgttctttagaaacccaaattaaacagttgctcccacaagtccgtactcgcgtgtcattactcgaaaatggcccacctgttggttatccattgcagtatcgtgtgtcaggtgaagatttaaatctggtacgtaaagaagcacaacaggttgctagggtaattagtgaaaacccgaataccaccaatgtgcatttggattggggcgagccaagcaagattatttccattcaaattgatcaagaccgtgcgcgacaaatgggtgtgtccagtcttgatttagccaacttcctgaacgcctcaattacaggtagcgcaattgaacagtatcgtgaaaagcgtgagctgatcgaaatccgattacgtggtgataaagctgagcgcgttgaagtagcttcactggcgagccttgcagtaccaacagcgaatggaacaactgtacctttagcccagattgcgaaaattgaatacaaatttgaagatggtctgatttggcaccgtaatcggttaccgacaattactgttcgtgcagatattcgtaccaatttacagccagctaccgttgttggagagttagctgaatcaatggacaagttacgcgctgagctgccaagtggctacctcattgaagtggggggaacagtggaagagtcggcacgcggacaaagttcggtcaatgctggtatgccactctttttggcagtggtcatgacattactcatgattcagctgaagagtttgtctcgggcaacaattgtatttttgactgcaccattaggcttaattggcgttgttttattcttacttttgtttaataaaccatttggttttgttgccatgctaggaaccattgccttatccggcatgattatgcgtaactcactcattctgattgatcagattgaacaagacagacaggcagggcatccaacgtgggaagcaattattgatgcaacagtacgccgtttccgtccgatcattctcacggcattggcagcagtactcgccatgatccctctttcgcggagtattttcttcggtccaatggctgttgcgattatgggcggactcattgttgctaccttgctgacattatttttcttacctgcattgtatgcagcgtggtttaaggtgaaaaaaacagcataaaatacataaattttttgtgaataaaggtgcgaaatattgaaaagtccaatatagtagcacctgtctttacacaaaaaatacaggattatttcgctgcataaaaaataggcataatgcagtgaattgaggtgaaatacagatggggcaagaccatatcgaacagcatcgccgttatattgtaatttcttatgcgttcatgtttcttgcattgtttacggttatttttgcggcctttgcttatctggtcgctcgtaaagtagctgttgtggatgatgcggaagtttggattcatgctcatgcgctatggattatgcgcaatggtattctattcctcctcatgtcagtttttgctgtggtctggtttattcctctcttcttttttgcatgggatagcagcctttgggtaacggcttcaacagttgctggtgtagtttttagtgctattgcttggttatttttattaaatgcatggttaaaaggcttgtctaagtatttaaaaaataaggcagttttttaatatatctgttttttgaaagttttccccttgtaaattcggctaaagccccccatttagtcggcaatagagtattgataaaatttccgtgaggagcaccgccaaacatggctaaacgtgattattatgaggttttaggcgtttcaaaaaccgcaagtgatgatgagatcaaaaaagcctatcgtaaattggcgatgaaatatcatcctgacagaaaccctgacaatgccgaggctgaagaaaaatttaaagaagcttctgaagcttatgagattttatcggacagcgaaaaacgcagcatgtatgaccgtatgggacataatgcgtttgaaggcggctttggtggcgctggtggtggctttggcggtttcagtgcagaagatatttttagccagttcggtgatatctttggtggagcgtttggtggcggcggacgtcagcaacgccaacgtcgcggttcagatttacgctatgtcatggaacttacccttgaggaagctgtaaaaggggttaaaaaaacaattacctttactgctccagcaccatgtgatgtgtgtgatggtaaaggctctaaaaatccaaaagatgtagaaacttgtaaaacttgtcacggttcaggacaagtgcgtatgcagcaaggtttcttctctgtacaacaaacttgtggcacatgtcgtggccaaggcaaaattattaaaaacccatgccatgcatgtcatggttcaggtgtagcagatcgtcagcaaacattagaagtgacgattccagcgggtgtggataatggtgaccgcgttcgtttaagtggtaaaggcgaggctattcgtgatggtcaagctggtgacttatacgttgaagtggttgttcgtgaacacgaaattttccaacgtgatggtgccgacttatatatggacgtaccagtaagcattgctgatgctgcacttggtaaagaaattgaaatcccgactttggaaggccgagttagcttgaagattcctgagggaactcaaacaggtaaattattccgtttacgtggtaaaggtgtgcgccctgtacgtagcagtatggtgggtgatttactttgccgtatcgtggtagaaacaccggttaacctaacctctcgtcaacgcgaattacttaaagaattacaagcatctttcgatggtgaagacagtgcgtcttcaccaaagaaaaaatctttctttgatcgcttattcgattaatgattgattagatcagaaattaaaaagaaggcggatattgataaaatatccgcctttttattgcgctgattcatcttattatttttattttgctttaaagaaaatgactcgtaattattctgtaggatgagcgacatcaatatcatcaacacttacgttgagttgacttgatgcaattggagtcactacagcttcggcagtagcttgaggagctggttgtatagctgcttttactgtttcttcagttttttcttcaatgattggatcaatatcttcaactttaacctcagtagtagcatcgcttgtttgagctgtaggtgttgctgcttgagtatttacgtttgttgtaatacgtgctttagataagctctctaatgtttctccgggctggattgcaggttctgcaaatgccattgaacttattatccccataatgacggttaggccaataattttcgaatgcatgctgaactccttatagtcatctttttttcattcgtggctcagtagtgtgcagttcaattctttaacttttgtgaaaacagattaaattccggttccctttaaaaaatattttttaccttttattgtgggcaaagagttttgatatagtaagccaattacgtaaaacagaagattgggaaggattatgtcagcagctccacgcattggtattttgggtgcaggcggccgtatgggtcgtacacttattcaggcagttcaacaagcaggctatcaattggctgcggcagtagagcgtccagaaagtagtttggtcggcacagatgctggtgaacttgcaggaattggttcagtgggtgtgaaggtttcaggaagcttggctgatgtacttaaagattgcgatgtaatcattgattttactgcaccagctgccaccgcccagcatttaaagctatgtcgtgaagctggggtggctatggtgattggcaccacagggatgtctgatgagcaaaaggctgaattggatgaagcagcaacgcatacacctgttgtatatgctgccaactactctgttggcgtaaatgtatcaatcaagttacttgagcttgcagcaaaagtatttggcgatacagtagatattgaagtaattgaagctcaccaccgtcataaagtagatgcaccatcaggtactgcattaatgatgggtgaagcaattgcggatactttaggccgtaacttaaaagaagttgctgtttatggtcgtgaagggcataccggtccacgtgatcgtcaaaccattggtttcgaaaccatccgtggtggcgatattgtaggggaacatacggtcatgtttattggtgagggtgagcgtgttgaagtgactcacaaagccactaaccgtatgaactttgctgccggtgcagtacgagctgctgcatgggttgtgggccgtgaagcgcgtaaatatgacatgaaagatgttttagggttgaacgacgtacaggtgtaaaccatctgtacaattcccatatgtggcgagaaaaacaagatagagcagaacatgaataaaaaacaaattgctttgaccactcttctttgcttaagcagcctctatacaggggctgcctctacagacaaggctaaactcagcctagaccgtaatcatattaaagtgtggacctatcaaaaagcagataacccagtctttcaatataaagcggaaacaacgtttgatgtacctcttgaacgcgctgtggcggtgattttagatgtagatcgtgcggctcaatgggtgccttatatgggtaaggtccaaatgctttctcaggatgaaaagaaaggcgaattcactttatatatggtgttagattttccttttccgctaaaagatcgtgatgtagtggttaaaggaaaaatgagtaaagcagccaatggcctaattactattaaaaatacggcagttaatagtaactatccgatacaacccgatgtcgtgcgcctaacacgctatgaaggggactggacatttcagaaacttgccaataataaagtcaaagtcaccactagtggctatgctgatccagcgggtgcaattccgttgagcttcgtcaatatgtttgttcaacagcaaccgtatcagatgctgcttaaaatgaaacgggaagtaatgaacccgatttatgagcaacctaagttgccggaaattttaaaataaataagctaaaaaaagcgcctgatctcaggcgctttttttattagtctggacactgttgtaaggtttgagcggggctgctttctcgtttgatttggaataaaaccaataacaaacctaatcccgccagtaaggcgcccgcaaaagatactgcactataaccccaacctaaatcgagtactaacgcgcctgcagcggcacctactgcattacctaggttaaacgcaccgatatttactgaagaggcaagccctggagcttcgtgagcaactgacattacccgcatttgtaatggtggtactaaagcaaaggttgctgcaccccatatcaccaacgcaatggctgctccaatctggctttgagcaagaattgggaaagtcaccatcatcacaatcaacagtaccaagaaaccaatcagagttttgttgatggacaagtctgcaaaacggccacctaaatggttaccaatcgagaaaccgacaccaatcagcaccaacatgaacgtaatgaaggtcggtgaagcatgcgtaaactcagtcaaacttggcgcaatataggtgtagagcgtaaacattgcacctgcaccgagtacggtagtgagtaatgcaagaaccacaggggtacgcgttaatacttttaactcggccttcacgtttggtttttgggcaaccataccttgcggtaatgctttccacaaagcgagcatagtaatgatgccgagcacggaaatcgcaaggaaagacatacgccagccaatgttttgcccaacccatgttgctaaaggcacaccaccaatattggcaatggttaagcccataaacatggttgccactgcactagcctgtttatgcgctggtacaatactagctgccacaacagaaccaattccgaaaaaggcaccgtggttcaggcttgtaatgagacgtgcacctaataagctcatataatttggtgaaaacgctgcaatcaggttaccgaccgtaaagatcgccatcaaaaaaataagcgcattacgtcgtgcaaaaccaccaaaccacagggtcataaacggtgcacctagcattacgccaagtgcatagcctgtaattaacataccggctgttggaattgaaatccctaaatcattagcgatgttcggaagtaaccccattggagaaaattccgtggtgccaatagcaaaggcaccaattgccaatgccaataacgagaacgccgtatttgattgagtgttcatgagtttagtcccaaactggtgcccatggctctgggctaacttcacgactgttacggtcgagttcggcaatcatttgcatttcagccgcagttaactcgatatcctgtgcttttaaattactaatcaggttttcacgtttagtcgaagatggaatgactgcaaaaccacgctgcaatgcccatgctaatgcaatttgcgctgtcgttgctttatgagctgctgcaatctccgctaaaacagggtcttgaagcactttgccgtatgcaagcgtcatgtatgaagtgacatcaatattcttctcttgtaagaaattcacaagtttatggttttgaagataaggactcagctcaatctggttcgttgcaatatgctctacaccaattgtgtcaattgcttgttgggtaagtgcaatattgaagtttgaaataccaatttgtttggttaagccttgttgttttgcttcaagtaaaagctgcatgatttcaggaattgaaacgcctaaatccggtgctggccagtgaatcaaagttaaatcgacatggtcagtacgaagcttttgtaagctctcttttaagcttggaataaacttatcttgagcaaaattatctacccagatttttgtagttaaaaataagtcctgacgtgatacgccactttcagcaatcgcttgaccaattgccgcttcattttcatagatttgagcagtatcaattgcacgataaccgacatctagcgcatttttaacagaatcaatcacagcttgttctttaaggcggaaagttcctagaccaaaacgtgggatattcatgtattcacctgaaattaaataattgtttaacttgaggtgcattttgctttttttattgttgcgaaaaaatagatgaataagcaaaatatctttgatgtttagtcaataatagaataaacgatgaaatcaacaattgaagaacttgttgcctttatcacaattgttgatacaggttcatttgtggcagcagcagaacatttaaagcaaacaccttcgggggtgagccgatctttaacccgtttggaagcaaagttagatgtgactttgctagagcgaacaacgcgtaaattgaaactgactcaagaagggcaacagtttctggtaaaggcccgtaaaattttaaatgagctgaatgcggccgaagaagaacttcaaaagtctgatcaaggtactgccggtcttattcgggttgattctgccacaccgtttgttttgcacgtgattgcaccattaatgcataaattccgtgagtgttaccccgatattgaaatcgaattaaatagcaatgatcaggtgattgacttacttcagcataaaaccgatgtcgcatttcgatttggggaacttaatgactccagtctgcacgccaagttggtatgtaagagccgtttatatattgtggcaagtcctgactatctagctcttaagggaacgccaacacaacctgaagaacttgaacagcatgatttgattggctttactagacctacttatatcaatagctggccaattaaagttggcgatgaatatttttttgcccaatcaaaaattaaagcatcgagtggggagaccgtacgccaactgacgattagaggacacggcattgcgcgactatctgaatttgaaatttggaaagatatggaagaagggcgattgattgcattatttgaagacaaaattgagcatcaatatcaaagcatccatgctgtgtattatcaacaagagcatctaccaaaacgaatccgtttattcattgaatttttggcagaacagttaaaagatggttttaaaaacgctctctaaaggtcgtataactatcggttggaatatgaacttctaaaataggtgtcgtttgtccttctgccgaatgttgagacagaaaatagcttttttgctgttcttggcagctaaaatatagtttggaatagactgaattcaccataacaacttcatttgagctattacgtttatattgataatgagaaatcgcactggtctcgtcatcagtgcgttgctccattttgtagtcttgctggttggtcatttttaaataaccttcaatcaaactttggcaaaccgtgtgtctgtactgttcattttttggttgtggttggcaacctgctaaaacaatagtaaataacaatataacttttaatttcattggcttgctactctctgagttgatttccatagcctaaaggtgttctataaaccagtacagatacagaaatttttaaaaaagcagcacagaatgacttttcaatatcaggttcttgccaatcaattagcacatcgtatttatcaagatgaacttaaacctcatcaaaagctcatttccttacgagattttgcccgtcaacaaggtattagtttaagtacagcaaaaagttgctatgaattacttgaggcgaggggactcatttatgtaaagccgaagtcaggttattttgtggttgctcgtaccccatccagccctattccggatagtccagattttttatctttgcctcgacatgtctcaaatctggagttgcataaccaaattcaggaagctgctttacaaagtcatcttgtacctttgggatcgattcagttaacgccccactttattcctgtagagggtttacgtcgttctattcaacgtgctttaaaaaattgtcagcctcaagattttctttattgtaataaacaaggtcatgaacaattaagaaaagcactatccgatcattggcgtgaagatggcatttatatcgctccggaagatatttttattaccaatggctgtatgccggctttgtctttagtgattcagaagcttactgaagtgggcgatagtattcttattcctacacccacctacaatggtcatttacagttattagcaagtttaaaacgacaaattgttgagattccggcagatcatcgtggcattgatcttgagcgcttagaatctttaatgcagcaaggtttggcgaaggtttgcttaatgacagccaattatcaaaatccattgggatattgttttagcaatgcagagaaacagaagattgctgaattagctgcaaagtatcagtgttttattattgaagacgatatttttggtgaatgtggctacagtagcgagcgaccattacccattcgatattgggaccgcgaaggttatgtgatttggtgtggttcagtgtctaagtctttgtcgagtgcgtatcgagtaggatggttttgtttaacgacaaagttagaacatttaaagcttgaactgctggtaagtaatatcggggtgaatacgcctttacagttaggtttagctgattttatttatagtcgtggttatcgagagcatttagagcagttaagacccaacttgatgcgacaagtcgaagaataccgtagctgtattttaaaagcctttgaagatataccaattgcattgagccagcccgaaggcggatatgcattatggatacagttacctaagagtgtagataatttagcgctctattacactgcacaagctcagggaattacagtggtaccgggccatgtttttggtgaggatgaacgctatcgacatttcattcgtttaaacgcaggccatgagttaactgccgatgtccgccaagcaattatgagcttggcaggctggtcgcgacaacagatgcaaacagtgagttagttttattctgcaaagtctgctttaagcacaatgcggtagcgtgcttgacctgagtgtagacgttcaattgcttcattgagctgtgacattggaaatagctcaatttgaggcgcaatttttttgcgtgcggcaaactttaaaagttggcgtagagcagcaggtgaacctgtaggtgagcctgttactgacttggcaccatcaataagtgaacctacagaaacaggaacaggttctagggtcagtcctaaaaagtgcaaagaaccgtttggtgctagcgtagaaatgaaagcacgccaatttaaagtcacattcacggtactcagcaataaatcaaatttacccttttgagcttttaccgcttctgtatcgcggctattcaccacatggtcggctcccattgctttgagttcttcggttttatctgggttagaactaaacgccgtaatttcacagccccacgcttttaggagcttaatggcgatatgacccaaaccaccaataccaatcacacccacgtgatgtgttgcctgaattttgtgtttgagtaatgggtcaaaaacggtaattccgccgcaaagtaaaggacctgcactttctgggtctaaatcttcgggaaggggaatggcccattgccaaccagcacgaaccttatcggcaaagccacccgcatgtcccacgattgttgcgacattttcgcccgtacaaagaacttgctgaccgccaatacactcatcacaggcttggcaactctcagcggtccagccaataccgacacgttgcccaatttgtagtcctttggcttctgagcctaaagcaacaattcgtccaataatttcatggcctgcaactacagggtacacggttgaacgccattcattatttaaaacagaaatatcagaatgacacaaaccacagtattcaacttttacctcaacctgatgcggttgtaattcacctgcatcaaattggtatgggaccagtttttcacctgcctgcattgcagcataagcctgaatcgtattattgctcatcggaaactccttaagcggatttgaaccgttctggtgggttaggaagctttaaattgacaatcgttttcatggtcattgaccatacccactgcttgcataagagcatagcaggtggttggaccaacaaatttgaaaccattttttttgagcgttttggaaagttttaggctgagctcagtttgagcaggggccttacgataatctgcaacatcattgttttgtggcgctgcatctacaaactgccaaagccatttagaaacatcaccaacttgggctttaagggcttgccaagcaatcgcattatcacgaatagctttgagtttgcctaagtgacgaattaagcctgcatcggatagttttgtttctaaaaagtcatccgtaaatgcggcaatgtcagcaataggatgattaaaaaagtgctggcggtagctttctctttttttcagtacggtaatccaagatagacctgcttgttgtccttcaagacagagcatttcaaatagtcgggcttcgtcgtgttctggtttaccccattcttcatcatggtaagcaatatagagtggatcatcggaacaccatccgcagcgttgagttttcatgatgatgctccttatatttatcttggtattttagagtttgaatggtacccattcatttggacgagtatcccaataatacagttcagcttgagttaagtcttcaaactttagccaaaagtctttgccaactttatctgaaaaaccggtactgatcagtagggcatcatcactgatttccatgatccagccttgatagctattgccatttaaaatgatcttttgctggttgccagactcggcaaactctactaagcgattgatcagcgcttccgacataaaatgttcctagcgtaaatatgaataaggattaacagcaccacgacctttaccatctaagtaaagaccataatgaagatgaggtgaagtataacgtgcattgcccgtgttgccgacatagccaatgaggtcgccctttttgacatagtcacctacgtttaagccacgtttatgtccatcaagatgagcataataatgccatgttcctgccgggcctaaaatccagatgactttgccaccgaggttattattacgaagatcggcaatgagcccttcagttgcactgtacactttggttccacgtggagccaaaatatcaattccttcgtggctacggccctgactccgagcagctccccatgtgtcttttaactcatctcgatcgacaccttttaccggaacaggaagccgacttggaagctgcatactcttgagtttgctaacttgagctggtgaaagcggggcaggttttttaggtgcactggcacaggctgccaatagaataatgagaaaaccaagtgagagatgggaaacaaaacgtcgcacaaaatactccctgtcacagccatatcaaaattattttgctcactatgtcatgaacggcttgtcgagatcaattttttcatagcagttggaacacctttagcaatagcttgttctgggcttaaccattggccttcaagttcaatcgccagatgttctttttgatcaggttccacgtggaacacgtgagcattaagtaaccatgtgaagtgagtaaagctatgactgatctgaaaagtttgtggttgaggttgtagcttaaattgctgacttaatttcaagcgttcatgttcattttctaaaataggtaaacaaaataaaccgccccatagaccatgagcttggcgttgctgccagaaccattcatcttcgcactgaataataagaacatctgccgttttaataggtggtgttttttcggtttttaaaaggtaattcttgttctaaaccttgctgataagcctgacagtgagcttgcattggacaatataaacaaagaggctttttaggcgtacagatggtcgcacccaagtccataattgcttgagtgtagtcatgattgcgttgggtgggacaaagttcttcagcgagtttccacatttcacgttcgtgctgtggtttgcttaagtcatcttcaatggcatagaaacgggctaagacacgtttcacgtttccatccataatcacgccatactgacgtaaacctaaagacatgagtgcacctgcggtcgagcgaccaatgcccggtagtgcaatccattcttctagggtttcaggaaatttgccttgctgtgctacaaggccggcagctttatgcaaattacgggcacgagcgtaatagccaagacctgcccaataaggggctacttcatcccaagttgcatggcctaaagcttctacagttgggaagcgctccataaagcggtcaaaatattgcagaactgtttttacctgagtttgctgtaacataatttcagaaacccagactttgtatggatcatctgcgacttgccaaggcaaatcatgccgaccatgttgatcgaaccagtttaagagggcatcagaaaaagaaaattcaggcatgaacagctatagaagaaaagtaagggctaaattatagctgaaatttaggtgaaattttgtttaaagcaaacgaagaaaatggacatatgaaaacagggactacatcaaaaatgtagtccctgttctatgagtaaaaaggattaatccttttgtacaccccaacgttgatcaagtttcaacggttgatttttgtaatatggaatgacatgaatgtggaaatggtcagaagtctgtccaaacacttcaccatcattaaagccaatatggaaaccgtctggctgatggcgaagctgggtttcatgacgggcaatttcaagaagtgtcagtaagccttggtgctctttagacgtaatatcaaaaaacgagctgacatggcgtagtggagtcactacacagtgacctttagacaacggatttgggtctggtaaaattacagcaaattcattcttatcaatgatgtcatattcatcaaaatcgcaatacggacatttcttgtcagtcattgttgtatcctctcatgttattccattaaaccccgagtgcgggaaataagactaggctttgctctagctcaacgggagtatatttattgaagtatggtttaaaaaatacagtaaaaatattgcaaagtcataaacatttaagggagcaaatgcgaaaaatgccatttgctccaaatttgcttcttttattttaaagtacgttctaataaagcgtacattttagcaaggccttgtttctccgcttcgctgttgtagccaaggtctacaccattcgctttagctctttcatctgcaagcgggttactaaagccatgtttagcatcttttaaaaccactacctcatgtttaacctcagcagcttgcatctctttttcaaaattagcaacatcttctaaggtgaccatgctgtctagttcaccatgtagaaccaatacctcgccttgaatgttgcctttttgagcaggagccttaggagttaatgtaccatggaatgtcgcagttgctttgaggggagcacctgagcgagctagatcgagtaccactttgccaccatagcaaaaacctaccgctgcaagtttttcactatttacttccggttgagcagccaaagtctgaagccctgcgttggcacgatcagtcacagtgtctagatcttcaaatgtctgcatcatccattcataagcttgagctgcagtcgttgttacttttttatcgccatacatgtcaattgcaagtgcagcataaccgtgttcagcaagttcacgcgcacgttgttcagtgtattcgttacgaccccaccactcaggaccaataatgacacctggtacaggtgtttcactttctggagccgcaaagtaaccaattaaatggctaccatctggtgcagtatattgaatttcacgggttttaattgctgtactcatgacattaatcctgaaattaaattcgatttaaatacgcttgattaaagcataaaaaataaaagccatataaataactatgtaaaaaactacatcaaaagaaaagcatagaaatatttatgcaataaaaaaagaaggaacgagttccttctttttgatatggtcatgattaaattaagttcggcctcgcgaaataaaaccaataacagcgagaattacagctatcactaataaaatcacggcaaagtctttagataaccctgcaacaccaccaaaccctaatagactggcaatgagtgcaatcactgcaaaaattattgcccaacggaacatatgctgtcctccttatttttcattgtctttttactatatagcgtgttttttgcacgaaatgtgtcgtttatgtggttgaaatgtatattaaacaatcattttgtgatgccaaaaatacggcttcttttcttaagaccagcgtacttcaatgctataatctgattttgcttgatctatatagccgttaaaatcttatgtctaccgagacctcacttcgtccattgttttggaaaaattatacgctagagcaactgactcaggctgagtgggaggcactgtgtgatggatgcggattgtgctgtttggtcaagctagaagatgaagatacatatgaagttgcgtacaccaaagtggcgtgcaagttacttgattgcaatactggacgttgttctgactacccaaaccgtcagcagcaagtacccgactgtttacaactaacaccggaaactttaaaaaccatacactggttgccatcgagctgtgcctataaacgtttgaatgaaggcaaaaatttaccttcttggcactatttaaatacgggttccagacaaagcgtagtgaaagcgaaaaagtcggtagcagggcgttgtattcctgaaactgatgtacatgaagatgatatcgaagattatgtggtgcgttgggtgcgttaatacgctcccgatgagcatttttaattacagcgtataataaagtaacatttttatcgtaaattttttaatcatctccgttatataaaaataaaagcaaaaggagataaaaatgatgagacgattagcagcccccttattatgtagtagtttcttcttgttaatggcctgtggctctaataatactaattcaaaaaatcctgaacaaaatacaactgcaaaaacagagcagaccagtgctgccaaacaaacttatcaggtcgaggcagtcgcacattttaatgagccttgggcgatcaccagtttgcctgatcagcggttattggtgactgaacggcaaggtaagctaaaaatttttaatccacaaaataaacaagtgctagatgttcagggtgttccagcggtgaactatggcggacagggcggtttaggggatgttgctctacacccagactttgccaaaaatcactggatatatcttagttatgcagccaaagggcaaggtgggtctggtgcagtgatttcacgtgcgaaactagatttatctgatcctaatcagccaaaacttaccgatataaagcagatttggcagcaagtacctaaagtctcaggacagggccattatgggcatcgcatgctttttggtgcagatggtaagctttgggtcagttcaggtgagcgtcaaaagtttgaccctgcccaaaatatgaaaagtaacttgggcaaaattttgcgtttaaatgacgacggttcagcagccttaggtaacccattttatgagcaaggcggtgtcactgctgaaatatggtcacttggacatcgtaacccattaggaatggcctttgatcgtaaaggacagctatgggtggttgagatggggcctaaaggtggtgatgagcttaatattattaccaaaggcgaaaactatggttatccgattgtttcaaatggagatcattattcaggtcagcctattccagatcatcacacgcgcccagagtttaaagcgccagaaattgactggacccctgtaatctcaccgtcgagcttaattatttatcgcggacaacaatttcccgcatggcaaaataaagctttaattggcgggttatcttcagaagcaattgttgttgtagatttagagcataagcccgtaaaagaagtacaaagattagagatgaagcaacgtattcgtgggttacatgaagcacaagacggttcaatttgggtaattgaagatggccccaatgctcgtttactcaagctgagtaagaaaccctcttaatgctaggaaataccctgtaaataaaggatgtgtctcatagattcaaattgtagatttctgtgagacacaatagactatagtgaaaagacgataaagctatttgagatgtcagacacccatattccacttcctgaacgcctgcgcccgagagacttgtctgaaattattgggcaagatcatttgttaggtgaacatgcgcccttacgtcaaatgattgatcaggggcatttgccttctattattttttgggggccgccaggcgtcggtaaaacgacaattgctttgcttttagctcaggcaatagatcgtccatttgtgagcttatctgcgctgaatacgggcgtaaaagaattacgtgaagtgattgcagaaagtggtgacttactgacccctgtagtttttattgacgaaatccatcgctttaataaatcacagcaagatgcattattaggtgccgtagaaaaaggtaaaattaccttaattggcgccaccactgaaaacccgtcttttgaagtcaatagtgcacttttatcacgctgtcaggtctataccttaaacagtttagacagtgaggcaattcagacgctacttaacaatgcactccaaaacgatagatttttaaaagaacgctatattcatattgaagagtatgatgctcttttacagtttgcagcaggtgatgctcgtaaggcactcaatttacttgacttaattgcaagtacttttgagcccgaagttgaaaataccattaccaatgcggttgtagtaaaagtcgctcagcaaaatattgcgcgttatgacaaatcgggtgaacagcattacgacctcgtttctgcctttatcaaatcgattcgtggtagtgatccggatgcggctttgtactggatggcacggatgcttaaaggtggggaagatccggtttttattgcaagacgtatgttgattgccgcttcagaagacattggaaactcgaatccaaatgcactattgcttgcaggtgaatgtttccgttctgtacaggcggtgggaatgcctgaggctcgaattattttggggcaaacagcagtttatttagcgaccagtgcaaaaagtaatagtacttacctcgcaattaataaggccttggaacttgctgagaaaacggcaaatttaccagtacctttacacttgagaaatgcgccaaccaaactgatgaaacagcaaggttatggaattaattatctctatcctcatgactacccagagcactttgtgttgcaagactacttgccacctgagttaaagggaaccaaactctatgagtcggcgagaaacaagcgtgaagttgaaggtgaacgcctacaacaacgcagatggcagcaggaacaatagttttattgtttcctgctattgttccaattcttcagtcacctgaccataaatcagcagggtaaacacgcctgtaccaccaataatattgccaatggtggttggaatcaggaaattaaacagatattcaccaagagaagcttctccttgccagaccagataggacatttcggtagagccaacgaccacatgggtaaagtcgcctagtcctatcagataagtcatgaaaaagatgactaggaacttattgctgacggaaggtagcatccagaccaatgcagcaattaaaagaccagacataacccctttaagcagattttgggtggcggaaaaagacgcaacatgatgtgcgagctcatctagtgctttatcaatgtttggagtaaacaggtcggtggtcaggaagaataaactcgccaaagctgttccaataatattgcatagaatcacgattccccatagacggcctacagctcgtaatttgtctaaggtaaaaggcttaaataggggcacaactgtagtaatggtattttcggtaaagagctgcatgtgtcctaaaatagcgatcaggaatccaatggtataaccgaaattggtaattaaatcggtccagatggcatcagttgggatataagaagcaataattgccttaaatacaaatgaaaaactgatgactagacctgctgcaatgcctgaaaagatgagcgcggctgttgggcgatctaactcttcggcaccatcacggcggataatttcatacactaaacggggcgacagtttctcgtgttcttcaactgccattttttcacgccagcttagggtttgatcgactttctcttcttctagttcatggtccatcaggtttactcctcactgaataaataatttatatttatcgttttttatttattgttaaggcagtgctcaggataaatctagaagattcctaccagctttatgtgtttttttataaattgaacactctgggggtaagcgaactagaacaataatgcatgaagaaaagaatcgaccagacctgagagaaaagttaagtataagaaaagatagcaaactcaatcagcctgctataaaaagtgtaacgttgaagctaagcgcttgtagtcatgaaaatggcaacaataattaaaacaaggtatatgctctcaaggtacgtatgagtttcatatagtcgccttgggaagcttcagaaatgacagtttcgatttcagcttggctccatccttgctttaaggcagagtggctaaaattagataaaatcactaatggattttcaccaaaatggattggatgattcattaatctcttttcaggcttaaatagttccatagactcatcctatttaaaaatttaattattgtgatgcaatttatattttttttgattttagtgccttgttttgagattgtgcaagtcataatttaattaaatatacaaatctgtctacttttcctaaattctaggatgctgaaaataaaaaaaccgagctgaaatgctcggttttttataaagttgagctgattagatgtcagataaatctacgcctaaacgagcagcaacttcttcataagcttcaacaacaccgcctaagccttgacggaaacggtctttgtcgagttttttcttagtgtctttgtcccataaacggcaaccgtctggagagaattcgtcaccaagtacgatacgatcatggaaaacaccaaattcaagtttgaagtccaccaaaatcatgttgccttcagcaaataatgcttttaatacatcatttactttataagttaacactttcatttgttctaactgttcagcagttgcccaacctaaagcaatcgcttgagattcgttaaccattggatcgcctaggccatcatctttgtagaacaattcaaatgtaggaggagttaactctttaccttcttctacacctaaacgacggcatagagaacctgctgcatagttacggattacacattcaacaggaatcatttgaagttttttaacaagaacttcagttggagaaagcaatttttcaaaatgcgtttcgatacccgcttcagcaagtttttccatgatgaaggcgttaaaacggttgttcaccttgcctttacgatctagttgttcgattttttcgccattgaacgcagaggcatcatcacgaaagactaaaatcagatggtcggcattgtctgtttcatatacagattttgctttaccagtatagagcaaggtttgttttaacatgagggaacctttttaaaaaaaatgcctagtaaacgactaggctggccaattttggtaaatctggtttaacacttctgcggcaacatcagggctggcaaaagtgttatctggattaaatagagcaaggctatgactagagccaacaccagtgagcttaagcacatatgtgttgtcatttactttaatcgtcgcttgattgttaccttgagcgatgacgttgtaatttaacgtgcttaacgtagctttggtgtattgccaaatctcggcagtacttccatcaatttttaacagtgggtttttattaccatctgtcacaagttgagggcgaccaagcgcactacctgtttgagcagatgcatctgctgtcgtatcagtttgaagtggttcaggacgtggcaatgcaaaacgattgccacgcttgttttcaaacttcggtgcgtgatcgatagcaagctggtctactgttggtgcaggatacaaaggtgtcgctggtcgtacagttgcatcggcagggtactcaagtggggcgagttgctttgcatttttataatctaaagagtgattattgagtgcgaagcgaccacagccagctaaacttaaggctgaaactgcaaggactaaaccaagacgtaattgcatcataaattgctcttattaaataattcccgcatcttttagggcattgcggagaggttcgcgatattgctcagcgagaggagtgagtggtaaacgaataccagtatcaatcagtcccatctcatgtagtgcccatttcacaggaattgggtttgattcgcaaaatagaatattgtgtaaatttgcaatcttattgttaagcgtctttgcttgttgctcatcttttgcaattgcaaccgcacatacttcgctcattgctttaggtgcaatgtttgcagtaaccgagatattaccgtctgcgccaagaagcataagttcccatgcagtttcatcatcacctgagtacacagccatcttgccgtttaaagcatcgattaaagctttaccgcgcggtacgtcacctgttgcatctttaatgccgacaatatttggaatttccgctaaacgaacagctgtatcgtttgacaaatctacacctgtacgaccaggtacgttgtaaagaataagcggtaattcaacagcttcagcaatcgctttatagtgttggtaaaggccttcttgagtcggcttattatagtatggggttacaagtaaagctgcatctgcgccaaggtctttggcagctttagttaattcgattgcttcacgggttgagtttgcaccagtaccggcaataattggaatacgtttgttggctacacgaataatttctttaataacctgtgtgtgctcttccatgctcaatgttgaggcttcgccggttgtaccgacggctacaatactgtttgtaccttgttctatgtgccactcaaccagcttctcaagactcttccaatctacaccgccatctttcaacatgggagtgacgattgcgacgattgagccttgaatggtctgtgcttgctgagtcattttaaaaaatatcctatttatccatccgaatctgaggtaagaaaaacaaaatgtgggatggttgcagtattttgattgtccagttctaacaataacagattgttgaatgacaattatgcaaattatgactgatcagacgcataagaacaatatgcttgactgataaaccctatgtaaacttgagcaaaacatagaatgccaatttgatcatttcaagtaaaagacagtaaaaatgagaatatggcgcaattcttccaacctctacttaacacggtcttttttatggcaagataaaatgcatatttttcccgaatgggacttaagatggcatgaaaatgaataaacaaccacaaaattcggctttagtcgtagttgacgtgcaaaatggttttacccctggcggaaacctagcagttgccgacgctgatacgattattccaaccattaaccaattggcaggttgttttgaaaatgtagtcctcactcaagactggcatccggataatcatatttcttttgcagccaaccatccgggcaagcagccatttgaaacgattgaactggattatggatcacaggtgctttggcctaagcattgtatacaaggcactcatgatgccgaatttcatccggatttaaatatcccgacagctcaactgattatccgaaaaggttttcatgctcatattgatagttactcggcttttatggaagccgaccactcaacaatgacaggtttaactggttacttaaaagaacgtggtattgatacggtctatgtggtcggaattgctacagacttttgtgtcgcatggactgctttagatgcggttaagcaaggctttaaaactttagtaattgaagatgcgtgcaaaggtattgatcttaatggttcattagaacaagcgtggcaaactatgcagcaacaaggtgttgttcgtattcaatcgactgatctgttgaatgaatgctagagatactgattttgatgcttggactttaattgcgatttggtatggatgaacagtatgtctgcattactccgttttactcagtttgttcaaaagacgtttgccctatgggtaattatttttgcagctctggcgctatggcaacctgaattttttgtttggctcaaagcgtacatcccatggattttgggcattattatgcttggcatgggaatgaccatgaccgttgatgattttaaaggggtactacaaagccctaaagccgtgttaattggggttgttgcgcagtttgtggtgatgccgggcttggcatttattttatgtaaattatttaatttgcctcctgaaattgcggtcggcgttattttggtaggttgttgcccaggaggaacagcttcaaatgtcattacctatatggccaaaggcaatgtggctttatcggtcgcctgtacctcggtatcaacactcttggctcctgtgttaacacctgcaattttctatctacttgctagccaatggctaaagattgacgcggcttcgatgtttatttcgattttgcaagtcgtactacttccgattgtgattgggctgattttgcgaacttggcttaaacgtcaggttgaatcctatattcaagtcatgccattagtttcagtgattgcaattgtagcgattgtggcagccattattggtggcagtaaagcagctattttacagtcgggtttgctcattttggcggtagtgatattgcataatgggtttggatatttattaggttttgccgcagcgcgtttctttaaattgccttatgcggacagtaaagcaattgcggtagaagtaggaatgcaaaactcaggcttgggcgtggcgcttgcagcagtgcattttgcggcttccccgattactgccgtaccaagtgctattttcagcctttggcataatatttctggtcctgcacttgcgacttattgggcaagtaaacacaaacaataataactatataaacgatatacattagaaaagaaggccaaacggatagtttggtctttttatttaaagcactttttatttgagctgaatttaaaattggtatgtcttttgcttcgaattgatgcactgaaaataacgtgaatatcaacataaatcgcaaagaaaaaaataaggcatttttttgatgaaccagatttttaaattatttattcccatgctctctagcaatttaattgtagtattaagtggattgattgatattgcttatgtagggcattttagcaatgatcatgttgccgccttatcggtgactttatctttatatacagtggtttatgtcattggaatggggatactgcaaggtgtgatgcttaagctctcggaagcttatggttgccatgacatacctcgtattcgtcaaatttttattcaaggcgtttggctgatgttaggttcggcattggtgagtattgccttgctttacttgttccgtgatctaccaaaattatttggtgcatctgaacatgtcgtttcaattactaaaaactgtatttgggctttggtatttattttacctgcccatttattgatgcgcttatttacagctttgtctcaggtcactgaaaatgcgtataaggttttattatcagatagtcttttcttcattcttaaaattattttgtcctatcttctgatttatggtgtcgctttattttcaattccgccactcggggcgataggggcgttgttagccactatcattgtacggtggtttatgttggtcgtttattacctgttttttctagagaaaaagtacatctttattgaacatccagaacggtcagttgaagatagctggcaaagtctgcgtatgattttaaaaatagggatacccacagcgatcatggcattgatggacgttattgcattttgttcagttgctattctgattttaccttttgggagtgtggtatctgcagcccatcaaattgtcgcgagcactggcggtttcatgtttatttttccttcatcaattgcctcggcttatagcattttggtgtcaagaactatgggcagcggcaacatgaaagaagcagacaaaattgccagacaaagtatatgggtcattatggcagtgagtggcagtttatccttgtgtttatgggtggagaggggcttaattgtcacgttctattcagatgatttggctgtacagattttggctgcatcactgctcttgattgtctgcatgtctcattttcttgatggcttaatgacgttactaacctctttgctgcgttgttgggatgtgtcgattttacccatgctgatttttttagtcgtggtgctatgtttcggattgggcggtggttggtggatggcttataaagggctgcactgggggagtcactctatatctgcaatgggaatttatggtttctggagtatggcagccataagctatttagtagcttgtgtattgagtgccttctgttttcgttttagaaagcaattaagaggtttttgattaggtagatcaacacaaccttaaagagggtgtgctgttaaccattcttcaatctcattttcagaaatcacttcaaaaccatggcgttgtaacagtgctgtggtaatcccaacacccgtgatcttctcgccttggaaagtaccgttataaattttttgactaccgcaagacggactgttttcttttaaaacaacacaggttgcttgtatttgccgtgcaatgtctaaagtacgataggcgccttttaaatatagctcagtcacatctaaaccagatgaatccaggatttttgccttgccatcaagcacatcttgacctgtacccccaacaatttctgcgggtaaccttggagtagtaaaaccacctaataactctggacaaagtgcatgcgcttttttatttaaaaatagctgcttaagtgtagtgtgtgagcaagagcgtccatcgtagcgtacaggctccccaattaaacaggcactgattaaaagcatgatttttccgcccttagaactttaaaagccatgtgagtgtacccaatgatttataaaatatgaaatctaaaacaagcacaagcaaacgaagtaatttgattaataaattacacaattcataattaaattatgtattgcataatttaattgtttttagtagcatctgttttaaggtaaatggccattgggggtccaacaaggatgttggcctccataaatctaggaataactttaggaaaagacgatttttaaaggtttattgaaaaatctcaatcgtacttttagataagaaaggacagtgtgtatggaaaacaaacaccatatagaagggaaattaatcatcggctttgcgctcactcaatcttcgttttagttattggtttttttctcataggatgcgttgggctaaggcattttgacggttcaaacatactcccagcaaatgcgtattctatagagaaaggagctgaccagatcagcatgagaagtaaacggatcaggtaattaccagagggaaactagatggatattttagagaacccattagaattatgcggttttgcatttattgagtttgtttcaaaagaaaatgaattagatccaatttttgaaacaatcggcttttcaaaagtagccaagcataaatcgaaaaaagcgtacttatggcgtcaaggaaatatcaatattatcctgaattatcagccagaatcttatgcttcattcttttttaatgagcatggtccatctgcttgtgcgatgggattcaaaactcgtgatgcagcaaaagcttttaaaaaggcggttgaacttggtgcagaaccaatgtactcaaaagttgggccaatggagcttaacattccggcaattaaaggtattggtggtatgccaatcttcttagttgaccgcgatatttatgaaaatgactttgttttctttgatgatgcgcagcgtaaccctgaaggtgcgggcttaaaagaaatcgatcacttaactcataacgtctacaaaggacgtatggagtattgggcaaacttctacgagaagatttttaacttccaggaaattcgttatttcgacattaaaggtgaatatacaggtttaacctctaaagcattaactgcaccagatggcatgatccgtatccctttaaatgaagactcagacaagggtaacggtcaaattgcagaattcttagctgattttaatggtgaaggtattcagcatatcgcgtttatttgtgaggacttaatttcgacttgggataagttaaaaggccttggtcttaagtttatgacaccaccgccaaatacgtattatgaaatgcttgaagagcgtttacctgaacatggtgaaccaactgaagagttaaaacaacgcggtattttattagacggcagtactaaagatggccagaagaagcttttattacaaatcttctctgaaaatatgattgggccagtcttctttgaatttattcaacgtaaagatgacgacggtttcggtgaaggtaacttcaaggcattgtttgaatcgattgaacgtgaccagattcgccgtggtgtgctcgaagcaaaataagttttgctttgtctctaatctaaaaaaaccaagagcaatgctcttggttttttatggctattgattagcggcttttaatatattgattaattgaattaatctcatttttaagtgtttcaataattttactttgtggatcgacgggtaaaaacatctcgctatcaagcgccacaatacaaaactcaatcccttggtttgagttaaatactggcaggcctactgcgttaataccggtaagtaaatcacctttcgccgcagacatttgttgttggcggatcgtctctttaagttctaaaaattcttcccagttatgtggcgcaatgtttagcccaagttcctgatgtttttgccactcagtttctaataaaggacgaacaaaatgctcaggaaggtaagaagcaaataaacgcccagcagcagaattgactaaaggcataattgagccaactttggtcacaatcgaaattgggtggttagattcaatcgattgaaccacgacagggcctttgggtgaccacttactaatttgaataccacagccaattttgctttgtaagtcgtaaattaaatgttgtactaactgtaaagtatcgctgtgctgaatgcagtttaagcctaaacgccatgcttgatcacctaaggcatattggccatcctcaagttgtttggcgtaatccatgcgaattaagctcaccaagtagcggtgtactttggcaggatgcatctcaagcttactagataagtctttgagaataatgggttgattgtgctctaaaagggcatttagtacggataagccaacttcaagtgattgaacccccccagatattttttcttcaatcatttaaatacccttaatcgatttacttcagcagttaaacagttttgttcagaacatagattggcattgatgcgttttacatcatgcctgagcctatagaaaaatagaaatcacctttttctattagcgaaattcacatgtttaataatccacaatttttacaaacaccttcatcttacatttatagcgtaaattgatagaggtttagtagatttaaacaatataaatcggcattgatatagaacagttcattcaaactattcccatcaatgccgacttttaaaacgattgctttgaaagaattacgcgcctaattcttcttcatgcaagaaatgagtgtggtgtggagcgcgtttggttttgctccattcctctaacatttcagttttcatttcttcagtaatttttgcaattttttcttcagcatgtgcatcgttataagtcagttctaaacgatgtccatttggatcaaagaaataaattgagtggaagataccatggttagtaatacctaatactttaacaccgttgtcttccaaatgttttttggcagctaaaagggcatttaaatcttcaacttcaaaggcaatatgttgcacccattgaggcgtattttcatcacggcccatttctggttgggttggcaattcaaaaaatgctaaaacgttgccttgacctgcatctaggaataaatgcatatacgggtcaaaagctttcgttgaaggtacatggtcttctgcaaaagctaagataaagtccatgttgagcatttttttataccactcaacagtttctttcgcatccttacagcgatatgcaacgtgatgtatttttttaatggcaaatgtcatgttgaaactcctttttactattcccaatctggttgttgttctggcgccgcgttatagaaggctgggatagacaaacaatgttgataaattgattcaatttttggaaacgccgacaaatcaatcttgaagcgtttcgcgttgtaaacctgtggaattaggcagcagtcggcaatggttgcgtgttgtccaaagcaaaattgtccatttgaatcttgaagttgctgttcgagtgtttgaaagccttcaagaatccagtgctgataccagtaatttttttgttcgtccgaaacatttaaatcattttttaaatatttcagcacgcgtaagttatttaacgggtgaatatcacaggcaatcgcctgtgcaaaagcacggattttggctctttctttcacatcatttggaagtaatttggtttcaggatattgttcatccagatattccaaaatacttaatgactgtgacagggttaaatcgccgtccactaaagttggtactaaggcactgcgatttaactttaaatagtcttcactttgctgctcatttttaactaaatgaacgggtacagtttcataagcgagacttttaaggttgagaccaatccgtactctgtaagctgcagagctacgaaagtaactatacagcttcataattaggctccgaagtttctgcaaaatcaaaagttaatgcaggaagtaccgtatttcggacttcaccaaaaccaatacggataccatttttctcacagtggcctttcatgatgagtgtgtcgccgtcttgcaagaaaccacgagtttcaccattcgcaagtgttagaggcttggtggtgttccaagtcaactcaagcaagctaccatacgaatctggtgtagaacctgaaatggtacctgaacccattaaatcaccaacctgaacgttacagcctccaatggtgtggtgagttagctgctgagccatagaccaatacatatatttaaaattagtacggcagatcacatcaggttgtgttgatttcgggctttgaatttcaacactcaaattaatgtcgtaactattcgcgatattttcttgtagatacgctaaaggtttaggctcttgttttgggccttccactttaaatggctcaagtgcttcaagcgtgactacccaaggtgagatggcactagcaaaagattttgaattgaaaggacctagaggtacatattcccattgctgaatatcgcgcgctgaccagtcattgagtaataccattccaaaaatatggtcccaagcattttcaattgagattggctggccaagctccgttggtttaccaataacaaatgctgtttcaagttcgaaatcgagtttacgcgtagctgagaaaactggacgctcttcatttggaagtttaatttgtccagatggacgcacgacttgagtgccactgactacaacagagctagcacggccattgtaaccaacaggcaattcagtccagtttggaagtaaggcatttttagggtcgcggaacatacagcctacattggttgcatgttctttagaagaatagaaatcggtataaccagatacttgaagtggtaaatgcaaagtaacactgtcttgcttaaccaaaacttcttggcgcaatgcttcattttcttgaagcgttaaattatcaactgaaagaagagactgtagcgttttacgaactttagaccaattggctttgcccgattgaataaatttattcagtgtaggctggttaaagtatgtgtcttgatctgaaagttttaaaagaccatgcttttcaagagcagcgagatcaatgacccaatcaccgatagctacaccgacctgacgctcgccttcggctgttctactaaaaataccataaggcaaattatgaatagtgaaatcagattgaggtgaaacttcaataaaagagtttagtttttgttccattttcgcttccttgtcttcatctcgcgtcttatacaaataaaagttcagtctagggactgagctactcaataagttttaaccgttatttagatcatctttttacttatgagtttgatagagaccgagaacaaccaattacttcatggttcttataatactgaattcataaaattacgcaatacataatttaattacacattacataataattgttatttcttgcattttctgttttcatgcgcggttgtgagaaaagtaacgcaattattttttcatcaatctctatgaaaatccgatcaatttatgatatacgtaatttattggaaaaaaattacgtgacaaggatgagaataatcatatgtcaacacaagagcaaggaaacctgaaacatggtttgagtaatcgtcacatccagctgattgcgttgggtggagcgattggtacagggctgtttcttggtatatcacaatcgattaaattggcaggtccatcggtaatcttgggttatgcgattgcaggatttattgcttttttaatgatgcgccagctcggtgaaatggtcgtagaagaacctgtaagtgggtcttttagccacttcgcttacaaatattggggaccttttgcaggcttcatgtcaggatggaattactgggtactcaatgtacttgtgtgtatggcagagttaagtgcaattggtctttatattcaatattggtggccgcaaatcccaacgtgggcatctgctctaacgttctttattctcattaatggtatcaatttactgcatgttaagttttttggcgaaatggaattttggttttccattgtcaaaatcttagcaattttagccatgatcggtttcggttcatatttacttgcaaccggcacagcagggcctcaggccagtatttctaacctttgggcattgggtggtttcttcccatttggtattgaaggcttggttatggcaatggctgtgattatttttgcttttggcggtattgagcttttcggtattactgctgctgaagcgcgtgatccagacaaaactttacctaaagctgtaaaccagattatctatcgtattttgattttctatattgcgacactttttgttttattctcactatttccatggaatcaaatggcagaaggtggcagtccttttgtgatggtctttgcatctttagatagccaaggtgttgcgacattattaaatttcgttattttgacagctgcggtttccgtctataacggaaccagttattgcagcagccgtatgcttttaggtcttgcccaacaaggtaatgccccgaaagcccttgcccgtattaataaacgtggtattccaaccaatgcggttctagtctctgcatttgtgacggtattgtgtgttttactcaattatattttccctgaaaaagcatttggtttactcatgatgcttgtcgtagcagcgattgtaattaactgggttgtgatttcatggacacatttaaaattccgtaaatttatgcaacgccaaggtcaaaccactaaattcccaagctttatgtatccatttagcaactatctttgcatggcattcatgcttggaattttagttgtgatgtctttaacgccagacatgcgtgtggcagttatgatgattccaggatggattttgtgtttgatggtggcttatcaatttaagcgccgtaaaataaaagctgagcagcctgttcatgctttagaagccgatatgtaaacagatagttagaagctaaagaggacgtataaatacgtccttttttattttttaaaatttacaacagaaattaaaggatttaataattgttatattataacatttctgaaattaaatgattaaaggctttcagatgtttagggaagatagaatatatttatgaagcgttatttaggtttactcgtattatctctggcggcttgtagtactcaaacaccccagccgacgattactcatcgttctcccactttgcctcaaccatctaaaactgtggttaaaatcaaacaacagcctgaagattatgtcgtttggatcgcaaccttagatcacagacagtctgtacaagcttataagcaatttcttaagcaaaaaggacttgccgatttagttccagaccacgagttattacgttcagccagagactggcaaaaatgtggagttgagccttacgcagttccaccacgcgagatttggtccaatattgttccgacgctcaatatattaaaagcgttggttgatgatggcgtaattaacgattttgaagtgacttcggtctatcgagctttagctttaaaccgttgtgcaggtggtgctgatgcttcccgacatgtctttaatgcagcacttgattttagaattgggccagaacagcctagcgacttagaccagttcaatattcaacaaactaaaaccaagctttgtcagttctgggcgactaaaggccaagcgtttaatatgggactgggtgtttatgcttcaggacaaatccatattgatagtcaaggttttagagcatgggggccagaccatcactatagaacctcaatttgtcagggactataaaagcaactttttcaaagactaagtgatttggcttagataaaactggaataaaaacttgatcaatagttatgttataacataacattattgtggtttagaaatagattacgcctgtgatctggccatatttaaatggccagccatgatcagtttaaatattattcaaagagatcaagccatgcacactgcaatcgccaactcatttgccaagcttcccgtcactgttttatcgggctttttgggtgcaggaaagaccacattactcaaccatattttaaataatcgcgaaggccgccgtattgccgtgattgttaatgatatgtcagaggtaaatattgacgcggctttagtacgcgaaggtggggcagagctttcaagaacagatgaaaaactggttgaaatgagtaacggctgtatctgttgtacgttacgagaagatttattggttgaggtgagacgtttagccgatgaaggacgctttgaccaattggtgattgagtcaacaggcatttcagaacctttacctgtggcagaaacttttacttttgaagatgaagatggaaactcactcaatgagtttgctcgactcgacactatggttacggtagtcgatgcttttaactttcttaaagactacagttcagttgactccttacaacaacgcggcgaatcattaggcgagcaagatgagagaactgtggttgaccttcttatcgatcagattgagttttgtgatgtgattgtactgaataaaattgatttgattgatcaggctcagcaagaccatcttatcgccattttaaaaacgttaaacccgcgtgcccgaattgaaattgctcaatttggaaaggtcgctttagacaaaatcttaaatacacagttatttgattttgatgaagccgcacaagcaccgggctggttaaaagagttacgcggcgagcatacacctgaaactgaagagtatggcattagtagctttgtttaccgtgcccgccgacctttccatccagaacgtttttatgatttggtacaggctgaatggccgggagtcgtgcgttccaaaggctttttctggttggctgccgaaccgacattggcttactcatggtcacaagcgggtgcaatggctcgacacggtttagctggttattggtgggcagccgttgcggaagaagactggccgagtgacctagccagcattgaacaaattaagaaaaattgggatgaccgcacaggtgatgcgcgtcaggagctggttttaattggtatgcaaatggatgagcaagctttaatacaacgcttggatagctgcttgttaagcgatgaagaaatggctttaggtccgcaagtttggcagagctggtctaatccttttaagcaagatgatgaaacgatgttgatcgcttaataaaaaagcccctattttcaaggggcttattttttatgatttatctttaataaaaacctttcgaatgtagctgttaagtggtgtggaataatatttttcaattgctgcgctaatgataaaagtcagaaccaaatagccaattaaaagcataattttaatgctagagtcggtttgggctggaataaaagcaaccttcataaggcccagcacaaccagatgaaacaaataagtttcataactcctttgccccaaccagaccattactttggtaaatagactatgtgcttgtgtttcggaaggatgttggaaacacagaatgagtaaacctgtggcaagagcaaataagctaataccccatgtactgacttctttaatgggcgcatataaatatagagcggtcatactcaaaataatcaaccatgaaagaggttttttataggtccaatttggctgatatttatgagaaaaaatcgccgttaaacagcccaccgctataccatcaaaacttgaaaaataatgatataaataagcgccgctttcttctccaaaatggagagatctaaaataaggcccatataaaattaccccaacaaatacagcaataaagaccttattactacgggtgagtagacacaataatggaaaaacaaagtaaaaaacttcttctacagagagcgaccacaacacgcccaaagcgtagtttacccaaccaaatttaataatcaggatattcatccagaaggttaaggctgcaaatatggttaaaggataagagacctcaatgccattaggtgcttggttcataaagggttttaagtcaaatgaaccaagtatgcttacacctaaaatgagtaataccagacacggtaaaatacgtgctgcccgtcggatataaaaatgcttgaggttaattgcagaaaattgtttgtctcgttttaaagtgtgatgggtaattaaaaaacccgaaatcacaaaaaacatggtaacgccataatttccgtttcttgcgatgactgtgctaaatgcttcacctaaaaaatcaaaacctaaccatgtatctttgagtttatagggaatattaaaatgatgtaaaagaaccaaaaggatagaaattcctcgaagaatatctattttataattacgcattcgatgtgcttccagttttattaatatactgtgtggcagaagaatactatcgatcagttattttaaataaaaattttaagcatcatttcgtaaaccagaaaaaatgatatttttgttttctaggatggggcactggcttagcaaaaataactattaaataaatgttgataaagcctttatatatttgaatttctctacataaaactttaaattagctcttgtcgagctatgtttattttttaaactttttaaaatatatttaattcataaattaacatgttgtatgtggttgtatatacatagcatgtcaactaaaatacctttttgcctgctgcctttttgagtatttgttatgcccagaacatcaaaacaagaacatactgagctttcgattgaagctgatagtccagttcctttatatcagcgcgtaaaacagctgatttcacaaaagatttatgaaggctcttgggctgtaaataaaaaaattccttcggaaagtgaactcgttaatcaactcggctgtagccgtatgacggtaaaccgtgcgctacgcgagttaacaacagaaggcttacttgttcgaattcagggtgttggttctttcgttgctgaagggcaaggccgaactgcactttttcaaattaacaatattgccgatgagattattgcacgaaaccataagcaccatgctgaagttttagtcttagaacaaatttatgcaaatgcagagcaaagcgtgttaatgcagactcgcgaagggcaaaaattatttcactcgattattgtgcattatgaaaatgatgtacctgttcaggtcgaagatcgtttagttgatgcagcactgattccagattatttagaacaagattttaaaaccattaccccaaatgcttacctcatggcaaaagcacccgtgacagaaggtgaacacattgttgaggccgttttagcatcgcctcaagagtgtaagtggttaaagattactaaagctgaaccgtgtttactcatccgccgtcgcacatggtcaaacaaacaactcatttcaagtgcacgattgatttatccgggcagtcgctattatctcgaagggaaatttaatccatgattaaattgatcagggccgatcaatatacaaaaatgctttggaaaaatggtgcaggctttactttagaaattgctcgcagccaaggtgaagccgactttgagtggcgcatttcgatggcagatgtaacaacttctgggccattttcgttatttcccaataagcaacgcattattagcgtactcgatgggcagggcatggtactgcatgtcgatgaccttcctgccaaaaagctgaaacagggcgatatttttgcttttcatggtgaaagtcaggtccaaagtgaactggtagacggtgcaattcaggatttaaatttaatttatgatcctgcaaagtttcatgcccgttttcagtggttgaatgaggcagcggagcaggcatttataagctcggcagacctgatttttatttttaatcagggtggtgaaacggaagtgaacgttgatgagcattccgttcagcttgctgctcatgagacgctaaaaattgagaaaaaatctggtgtcacatcaatgaattttccaaaaaaaaagcacaaaagttgctatatcattgagttaattcaacgttaaaaagatatagtttactgattaaaaagcacatgtcttgttagaagatatgtgctttttttatgtcagatataaaaataaattaatttaattcataagcttattcaatttttttaaaaaaatacgagcaagcctcttcacgccgaaaaatatttgtgtagtatatagatgtatatacaagttaatacattactatacaaatgcagaaacaagtgatgttctgctgatgtagctcaaaggaaggagtccgactgtgacaacaacgacaacaaaatttcgtgatgtagaaattcgtgcaccacgcggcactgaattaacggctaagagttggttaactgaagccccattgcgtatgttgatgaataaccttgatccggacgttgcagaaaacccgaaagaattggtggtatacggtggtattggccgtgcagcacgaaactgggaatgtttcgacaaaattgtagatacgctaaaaaatcttgaaactgacgaaactttattagttcaatcaggcaaaccagtaggtgtatttaaaactcataaagatgcgccacgcgttttaattgcaaactcaaaccttgtaccgcactgggcgaactgggaacactttaacgaattagacgctaaagctttggcaatgtacggtcaaatgacagcgggttcgtggatctacattggtagccaaggtattgtacaaggtacttatgaaactttcgttgaggcaggtcgccaacattacaatggtgatttaaaaggtcgttgggttcttactgctggtttaggcggtatgggtggtgctcagcctttagctgcaacacttgcaggtgcatgttctttaaacattgaatgccaacaagcaagtatcgatttccgtttacgtacccgttatgtagacgaacaagcaactgatttagacgacgctttagcacgtattgatcgttatacaaaagaaggtaaagcaatttcaatcgcacttcatggtaatgctgctgaaattttacctgagcttgtacgccgtggtgtacgtccagacatggtgactgaccaaacaagtgcacacgatccacttaatggctacttaccagtaggctggacttgggatgaataccgtgaacgcgcgaaaaaagaaccggaagctgttgtaaaagctgcaaaacagtcgatggcaaaacacgtacaagccatgcttgatttccaaaaaatgggtgttcctacatttgactatggtaataacatccgtcaaatggcgaaagaagaaggcgtagcaaacgcttttgatttcccgggctttgtacctgcatacatccgtccgttgttctgtcgcggtattggtccattccgttgggcagcgctttctggtgatccggaagatatttataaaacagatgccaaagttaaagagttaattcctgatgatgagcatttacatcactggttagacatggctcgtgaacgtattagcttccaaggcttaccagcgcgtatttgctgggtaggtttaggcttacgtgcaaaacttggtttggcatttaacgaaatggttcgtagcggtgaattgtctgcaccgatcgtgattggtcgtgaccacttagactcaggttcggttgcaagtcctaaccgtgaaactgaagcaatgcaagacggatcagatgcagtatcagactggcctttattaaatgcattgttaaatacagcaggcggcgcaacttgggtgtctctacatcatggtggtggtgtaggtatgggcttctctcaacactcgggcgttgtgattgtgtgtgatggtacagatgaagctgctgcacgtattgctcgcgtactgaccaatgaccctgcaacaggtgttatgcgtcatgccgatgcaggttatgaaattgcgattaactgtgccaaagagcaaggcttacacttgccaatgatcacgcaataaaaatacatggaagaactggcggtgctttttgcaattgtgaaaagcaccgtctcagcagaatatagtgcaaaaaattaggaagccaacatggaattactgatccaaccgggaaaactgaccttagccgatttacgtcaagcttacctcaacccaattaaagttaaattagatgaaagtgcttcatctgcaattaatgcaagcgtggcttgtgtagagcaaattgtaaatgaaggacgtacagcttacggtattaatacaggttttggtttacttgcttcaactaaaattgcgcctgaagatttagaaaaattacagcgttctttggtgctttcccatgccgcaggtgtaggtgaagcacttgatgatgcaatggttcgtttaattattctattgaaagcaaatagcttggcacgtggtttctctggtattcgtcgtaaagtcattgatgctttgttggccttaattaatgctgaagtttacccacacattccacttaaaggttcagtaggggcttctggtgacttggcaccccttgcacacatgtctttggttttacttggtgaaagtaaggcacgttataaaggtgaatggttaccagcagttgaagctttaaaaattgcaggtttggaaccaatttctttagcggctaaagaaggtttggcacttttaaatggtacgcaggtttcgacggcttatgctttacgcggcttatttgaagcagaagatttatttgctgccgcgacagtttgtggtggcttaagtgttgaagcaatgcttggttcacgtgcacctttcgatgcgcgtattcacgaagtacgcggccaacgtggtcaaattgatgtggctgcggcttatcgcgatttattgactgattcgagtgaaatctctcgttcacatgaagaatgtggcaaagttcaagacccatattctttacgttgccaaccacaggtgatgggtgcatgtttaactcaaatccgtcaggctgctgaagtattagaaattgaagcaaatgccgtatctgataacccacttgtgtttgctgaacaaggtgacgtgatttctggtggtaacttccatgcagaacctgttgcaatggcggccgacaatttagcattggcaattgcagaaattggttcactgtctgaacgtcgtatttcgatgatgatggaccgtcatatgtcacagcttccaccgttcttggtagcaaatggtggtgttaactcgggctttatgattgctcaggtaaccgctgctgctcttgcaagtgacaacaaggcgcttgcacatcctgcaagtgtggatagcctaccgacttcagccaaccaagaagaccatgtatcgatggctccaaatgctggtaaacgtctttggtatatggctgataacgtccgcggcattttagctgttgaatggttaggcgcttgtcagggtctagacttccgtgaaggtttaaaaagctcgcctaaacttgaacaagctcgtaaaatcttgcgcgaccaagttccttactacagtgaagaccgtttctttgctcctgatatcgaacaggctagtgaattgcttgcgagtggttgcctaaacgagttactcattccaaaactactccctagtttatctgaagtgtgattgataaaacggtcacatggagtggccgaatccaactaaatttcctcaaggattggagattataatgtcacaaaactccacactacagcggggcttaaacacccgccacattcgtttcttggcattgggctcagcaattggaactgggcttttctatggttcggcaactgctattaaaatggcagggccttcagtattacttgcttacatcgttgcagggattgcaatttatattgtgatgcgcgcactgggtgaaatggcagtccataaccctgtctctggctcatttagccactatgcttctcagtacattggtcctttggccggctttacgacgggctggacttatgtttttgagatggtgattgttgcaattgccgatgtcactgcgtttggtatttatatggggttctggtatcccgatgtcccacggtggatctggattttgtctctcatcatgttcttgggcgcaattaacctcattcatgtgaaagtctttggtgaactcgaattttggctctcaattgtcaaggtgagtgccattgttgccatgattttagggggcttaggtttgatgttctatggcttccatgctgaccatagcagtgtagtgccggggattcaaaacttatggatctatgaaggctttatgccacatggcattgcaggcttggttgcatgtttatctgtagtggtatttgctttcggtggtatcgaaattattggtattacagcaggtgaatcacaagacccgaaaactactttacctaaagcaattaatgctgttccggtacgtattttacttttctatgtactaaccatctttgtactcatgtcgattttcccatggaaccagattggtagccaaggcagcccgtttgtacaaatttttgaaaacttaggcattaaatctgctgcaaatattttaaatattgtggtggtaactgctgcaatttcggcaattaacagtgatgtgtttggtgcaggccgtatgttgtacggtatggcaaatcgtggtcaagcgcctcgaattttccaaaaattatcgcgtaatggcgtgccttggatgactgttgtggttatggctggcgtactgttaattggcgtcgtgctgaactacctgattcctgaaaatgtgtttgtcatcattgcatcaattgcaacgtttgcaactgtttgggtatggctcatgatcttgctttcgcaagtggctatgcgccgtaaattatctactgctgaaattaaggcacttgatttccctgtatttggctggccatatgcccctgcttttgcaatcggttttatggtgttcattttagtgatgatgggctacttcccagactcgcgtcctgcaatttatgtaggaatcacttggcttgctctcttaactattgcttatcgtatttgggtaaaaccagagcaaagcttgggaaaggaaagtgagcctgtccagcaaaacatagaaatggaaagctaacaaatcagctgcccaatagttttactgttgggcagtttcgaggataggctaatgaaaaaactttggcaaaactgccatattgccaccatgcaaaatgggcaatattcctacattgaagatgctgcaattgtcacagaagggcatctcatccactggattggaaaacaacaacaacttcctgccgacacttattccgaaacagttgacttaaatggcgcttgggtaaccccggggttcatcgactgtcatacgcatagcgtatttggtggtaaccgtagtgttgagtttgaaaagcgcttacagggcgtgagttatgctgaaattgctgcaagtggtggcggtattgccagtacagtacgcgcaacccgagaagccagtgaagaacaattactgaactcagcccttaaacgtattcgctgcatgcaacaagacggtgtaaccaccattgaaattaagtctggctacggactcaactacgaaaacgagcgcaaaatgctgcgtgtgatccgtcaaatcggtgaagctttaccaatgacggtcaaaagtacctgtttagctgctcatgctttaccgccagagtataaagaccaaagcgatgcttatatcgagcatatctgtacagaaatgctgcctaaactacatgctgaaggtttagtcgatgctgttgatgctttctgcgagcatttagcattttcgccagctcaggttgaacgcgtttttaaaacggcacaatcattgggtttacccgttaagcttcatgcagagcagctctcatcgctcggtggctcaagcttagcagcacgttatcatgctttgtcggctgaccatttagagtacatgaccgaagatgatgtcaaagccatggcagagtcgggcacggttgcagtgttattaccgggtgccttttatttattgcgtgaaacccaatacccaccgattgaaagtctgattaaacatggcgtgcgtattgcgctgtcgagtgatttaaatccaggtacatctccagcactctctttacgtttaatgctgaatatgggcagtacgttattccgtttaacgcctgagcaagcattagcaggtgtcactattcatgctgcacaagcgctcggtttagagcaaacacacggtagtttggagcaaggtaaagtcgctgactttgtggcttgggatattgagcatccatctgaaattgtttactggctgggcggagatttgcctaagcgagtcgttcagcatggacaagaagttattttttaaacggtgtcacatgaatcacacatttaaatggcaaggccgacatgatggcgagggtgaggcacatcaacgtattcaccatattgtgaataccacccaacatgctgaatttgtcctgattggttttagctctgatgaaggcgtgaaacgtaacaaaggccgagtcggcgctgctgatgcgccagatgcgattcgtacccaacttgctaacttaccgattcatcgcccagtcagtattgtcgatttggggacggtgacctgtgaatatggcaatttagagcaagcacaaagcgaattagctgaacaagtcgcaaatagcctagaacatggcttaaaacctgttgtattgggcggtggacatgaagttgcatttggcagctttagcggtctgttccaatatgtacaagcccacgcgccagataaaaaaatcggcattattaatttcgatgcccattttgatttgcgtgaagctgagcatgccacctctggaacaccttttttacaggcagctcgtctttcagaacagtatcaaaaacaatttaattatttatgtattggggttgccaaccatgccaatactaaaattttgtttgatactgccgatgcgctgaattgttcatatttacgtgatcatgaggttaatatttttaacctaaacaacgtgcttgcagcggttgatgcttttattgaaaaagtagactgtttgtacgttacgattgatttagatgtattcacggctgcggttgcaccgggagtcagtgcacctgctgtcaaaggaattgatttagcgacttttgaagcaatttttaagcatattcaagagactggcaaaatcaaacttctagatattgctgagtgcaatccaaaatttgatttggacaatcgaacagcaaaactggctgcctatattgtttatcaatatttgttttcttgagaaacaatttttaatgtagaaatgaaaaagtgcactgagatcgctcatgtgcgcttttttttgactttctggtaaattaaagtcggatacggaatatagatagcaactataattaatttaattaaaaagaaaattaatttataaaatcatttagttaaaaaaatactcgatttttacactattttatatgctgcttggcacgtaatttgttttgtctttattttaacttcgttaaatatgtttggataattaaatgaaaaacagaaccttacattttgcttgtatcagtgttttattttggatgtctcattcttctaatgctgcaacccccgaaataaatacaaatactatcgaaaaatcacaatctaaacaaaagagtgatgtctctgttcgggtgaaagctttaaaccaacttttacaggaacagtgggaatatactttgaaaaataaccctgaaactgcaacgactttaggcgatttacgctacaacgatcgatggaccgagttttcaaaaaatcagattgagaaagataaaaaaactacgcaaaattttttaaaacgttttgaagcaattgatagcacagggttttcagcaactgatcaattaaataaagatttaatgatttatcagttgaaagaaacacttaaaaattatgatttgaaattgtatgagatgccttttaatcaaatgtggggcctacatttacaatttccgggatttattagttcgattccatttgataatgctaaacaatatcaagattatatttctcgtttaaaacaaatccctcttatccttgagcaaggtattcagttagcaaaacaaggacaaaaagacggcttgatgccacccaaatatttaattgaaaaggtggcaaagcagattactagcattgcgatgcccgcagggaaggacagtgtttttgcttctccattaaagcaatttccaaaaaacatttcgaaagcagaacaagaacgtttaagccgtgaaatactacaggccatagatcagaatgttcggcctgcttatcaaaaacttgggacgtttatacagaaagattacttaccctatggacgacaacacgagggtatatggagcttgccaaacggtgacgagctctatcgcttttatgtagaaaataatacgacaacctcggagagccctgaaaatattcatcagctcgggttaaaagaagttgctcgtatagaagcggaaatgctgaaaattgccaaagcacaaggtttcaatgatttaaaaagtttccaacaatctctaaaaacaaatcccgcggttttcccaaaatctcgtgaagaaattttagagatttatcgcggatatattgcccaaatgcaaccagagttgccaaagctctttggtttgttacccaaaaataaagttgaagttttacctgtagagcaatatcgagaaaaagaagcggcaggtgcggagtatcaccaaggcacgcctgatggttcacgtcccggacaagtatatgtaaatactggcgacttctctgaacgttccaaaatatcaatggaagcgactgcttaccatgaggcaattcccggccaccatatgcagattgatattgcccaaaacctaccaaatttgccgatgttccgaaagcaacccaaccatactgcctatatcgaaggatgggcactttacgcagagcaattgggtaaagacgttggtttctataaagacccgctttcagactatggaagactatcgagtgagttgttccgtgcttgccgtttagtggtcgatacaggtgtgcattataaaaaatggacgcggcagcaaatgattgattttatgcgtgaacactctgctttagatgaacctgatattcaggcagagacggatcgctatatcgctattcctgcccaagcattagcatataagatgggccaactcaaaattttagagctacgggaactcgcgaaacatgagcttggagaccgttttgatatcaaagcattccatgacatggttttaaatgcaggaaccttgcctttaaatatactcgatgcccgtattaaaaattggataaaggaacaaaaagcggcagcttaaaacaaaaatcgaaatttaggtcaggtcctcgttgggcctgatttaaaaaccgatagaaaacagaatataataataaaaaatatattttcgaaactagaaatggaaaaaaacctaaaagaatatcaggctattatttttgatttagatggcaccttagccgactcctttcatttttttctaagcgttttaaatcaactttccgcaaagtataagtttaaatcggtaagccttcacgaagtcgattactacaaacaacttacgcctagagaaattatgaaagagatgaacgtttctcggtggaaactgccttggattgcgaaagactttattcggttaatgaaagaaagagatgaagaaattcatttgtttgagggtatgcgggaccacttaattgaactgcataagcggggttatacgctcgcaattattacttcaaactctaaagaaaactgtcaaaatgtactgggtaaagaactctgtgagctttttagccatattgatggtggctcgtctatatttggcaaagcgaagcgaataaagcgtgttctcaacattttggatgtaagtaaaaaccaagcaatttatgtcggcgaccaaaccacggatggcgaagctgcacatgaagcaggtattgattttgctgcggtaggttggggttatacatcggccgaaaaattaaaaaccattcagcccaaagtcgtgctcacagacttggcaaccatgaaagaatttttctaaatacatgaaatacaggataatgcatgaataacaataacagcccgattggaatgattgactctggcttaggcgggttgtctctctttaagcatattcgggaggcgcttccgaatgaagacattatctatttcgccgactcgaaatatgtcccttatggagacagagaaagcgactggattgtttcacgaaccacgcatttaatttcaaacctagttgctcaagggaaatgcaaagcgatcgtgattgcttgtaacaccatgacggccgtagcggttgaaacgattagagcgcaaattaatgtgccacttattgcaatagaacccgccgtaaaaccggcagtagcaatcactcaaagtaagcatattgcggttttggcaactgccaccacggtaaagggtaaaaatttaaaaagtttaattgaaacgtatgcgcaagatattaaagtgtctttagtgccttgtattggcttagctgaaaaaatcgaaacgggcaaagcacataccgcggaagttaaagattatttaaaaaatattttggcgccgttggtcgagcaaaaagtcgatacgattattttaggatgcacacactatccatttgtttcagatacgattcaggaaattgtaggccgtgatattcaaattattgagccttcggaagctgtgacagcgcaattaatacggcagctcaatcaatatcatttaagttctgaaagtccaaatgagggaaatcatattatttggaccagttcagacccgttggaagttgcggatgttactttttctttgttatctgagaaattgtctgtaaaagctgtagagctataaaaagcccaataggcaattaatgcatatcgggcttaataaatcagttattaaagcaggtgatgccttaataatgatcttttttgaattactctacagttactgacttcgccaagttacgtggctggtcaacgtctgtaccacgtaatacagcaacgtgataagacaacaactgaactggtacgctataaatgattggtgcaagccattcgtttactgctggaatttgtacaacgtgttgacgatctttttcgactacaccgctattttcatcagcaaaaacgaataactcaccgccacgcgcctgaacttcttccatattcgacttaagcttatcaagcatttcgtcatttggcgcaagaatcacgattggcatttcagtatcaacaagtgccaatgggccatgttttaactcaccagccgcataaccttctgcgtgaatatatgaaatttctttaagctttaatgcaccttccaaagcgattggatagtgtgtgccacggcctaagaataaacagtgttgtttttcaacgaacaattcagacaaacgcaaaatttcagcatcttgcttaagcgtatcaagaatgactttcgggctgtgccacaattcacgagcaagctcttcaatcatcacattgctaatacgctgtttcacttgaccaattttcaagattaacaacattaatgcagcaagctgagtcgtgaacgcttttgttgatgcaacaccaatctctgggcctgcaagcgtcaataagtggtgatcagtttcacgcaccattgaagaagttgcgacgttacagatcgttaaagtctgaatgtcgatattatttgctttagcacgtttttgagtttcacgtagtgcagctaaggtatccgctgtttcacctgattgtgaaatacagatgtaaagtgtattttccacaatcactggtgagcgataacggaattcactcgcaatctcaacttggcaaggcacaccaatcaattgctcaaaccaatatttagcgatcattcctgagtgataacttgtaccacacgcaataatttgaacactttgaagtttactgaaatctgcatcagcatctttcaagaaatcatcacgtaaattgttgccatcaagcgcttgagaaattgtttgtttgattgcttcaggctgctcataaatttctttgagcatgtagtgtttatattcaccttttgaagcactgcttacagttgcatcaagttctttaactggacgttcaacacgttcaccttttacaaatacttcaattgaagtacgagtaagacgggcaatatcgccttcctctaagtaaataaaacggtttgttactggtaaaagggccaattggtctgaactgataaagttctcgccaatacccacaccaattacaagtggtgaaccttcacgtacagtaatgagttcatctgggtaatcgctgtgaataatacctaacgcataggcacctttaagctgaggaactacagattctactgcttcaagtaaactatcagtattttttagagcttctgcaactaaatgggctaccacttcagtatctgtttgagaagtaaatacatatcctaaagcttgaaggtcatctttaagctcttgatagttctcgataataccgttgtgaacgactgctaccttgcctgacatgtgcgggtgagcattattttcggtcggtttaccgtgtgttgcccaacgggtatgcgcaataccaattgctccagtaagctggtgttctgaaacagcatctgcaagattggcaactttaccaacacggcgttcacgtaaaatttgctggttattgagtaaagcaacgcctgccgaatcataaccacgatattcaagacgttttaaaccttcaattaaaatctcggttacacaacgttctgcaacgcctccgacgataccacacatatttcaatcctcttattttttaagcttttggggacgttgataatttgctttagaaatttgttgagcacgctcaaaggagagactttgttcagccacatctttcgtaatcacagaacccgcaccgactgttgctccattaccaatagtcacaggcgcaaccagcgagctattagaaccgataaaaactgcatcgccaatagtggttttgtgtttatttgcaccatcataattgcaggtgattgtacctgccccaatatttgattcagcaccgatctcggcatcacctaaataggtgaaatggttagctttactgcctagaccgatcgttgtatttttgacttcaacaaagttgccgatatgtacttcatttgccaatttagcacctggacgtaagcgtgcgaatggaccaatttgggtattttccccaacaactgctccatcaaaaacgctgtacgcttggactttagtgcccgctgcaatggttgtattttttaaaatacagcccgcaccgatttctacaaagtcaccgagttcacagtcgccttcaataatgacattcacatcaatacggacatcatgaccaacttttactgtaccacgtaaatcaaaacgtgcaggatcagcaaaagttacgccttgctgcataagttcttttgcttgttgcttctgaaattcacgctcaagtgctgcaagttgcaggcggtcatttacaccttcaacttcaaatgcgagctctggttgaattgaggcgatttctaaaccatcagcaacagccatcgcaacgatatcagttaaatagtattcgccttgtgcattttcatttgaaagcttaggcaaccactcatgcagttttgcattgctgacacagtaaatacctgtgttgatttcttgaatttgacgctgagcttcggttgcgtctttatgttcaacaattgcttggattttaccgtcttggcggacaatacggccataacctgttgggttatcgacatgtaaagtaatcatgccaataccggttttatttgatacttcaatcagttgttcaagtgttgtttgacggactaaaggaacatcaccgtataaaattaatgaaatgccgtctttaggaagtacaggtaaagtcatctgtacagcatgaccggtccctaactgttctgcttgttcaacccactgaatattttcttgtgcgaatgtcttttttacgtgatcgccaccatgtccataaatggtaatgatgttttctgctaatagttgttttgctgttttaataacatgtcctagtagcgggcgaccagctaaaggttgtagtactttagggagctgagaacgcattcgcgttcctttgcctgcagcaagaataatgacagtagttgacatgaataactcgaatgatttaactcaaatggataataattagtgtacaaagagcagcccatacaccggcaataatatcgtcaagcataataccaaaaccaccgtgtacttggcgatcaatgacgcgtataggccaaggtttccaaacatcgaaaattcgaaataatataaatcctgtaattacccaaatccaatttatttgttgtaaatagagcagaggaagaaaggtaatagattgacctgcaaattcatcccacacaattcgaccatcatcatgaacatcaaggatttttgcagtttgaccgcaaatataaatacccaccactgacatgatgagaatagcgattaaacttaaagtaaacccgagagataaccagatgggaacaaaaagtaaggcgaaagcagagccaaaagtaccaggtgctttaggagcaagaccagatccaaaaccaaccccacagaaaacgatgcagcggttgaaccaagacatgtctttaaaatgaatcggcggtttatgcaaagtgttggtatccatgaatttgcaatgggtaatctgaacccaaatgctcaaaagttagttttgtttgctcaacgatctgtccgatcattgtaatcttaacgtctagttgtttttgcaaaagtttttcataattttgcggtgttattgtaaaacataattcgtagtcatcaccacctgccaaggcatattgccaacgttgtcgttcttctagttgttgcagtacaggatcgacaggtaatttttccaggatgagtcgtgctccaaccttggatgcttttaaaatatgtcctaaatcttgagctaaaccatctgacacatcgatcatgctagaggcgagcccttttagctcttctccaagcttacaacgtggcgtcggatagtccagtctttgttgtagggaatgtcctaaatgctgaagcccataagcagcatcaccaatctgcccacttacacaaacataatcaccgaccttagcacctgaacgtaatacagcttttcctgtttcaatccagcccatggctgtgacggtaatggtaaggtgcggaccttgagtggtatctccgccaattaaggcaactccaaattgattacaacagtcatagattccctgactaaatccttcaagccactcatggtcaacttgaggcaagctgatcgcaagtaaaatactatgtggtttggcacccattgcagcaatatcagacagatttacggcaacacttttccagccaatcgcatggggcgaggtttcaagagggaagtgacgtccagcaacaagtgtatctgcacagatcaccagttgttgatttggagggggagtaattaaggctgagtcatcaccaataccaagcgcaacgtcaggatgtgactgacgattaaagtattgatcaataattgagaactcagccatagaacatcaagcctattattttgcttgttgtttttctgcgctacgcagtgtcgaacttaaacggtctaatacaccattgatgtatttatgactgtctgctccgccaaaatgcttcgcaagttcgattgcttcatcaagtaccacacgatatggaatttctagatgatcacgtaactcgtaagcacctaaacgcaaagttgcgagctctacaccatctagcgcgtcaatttcacggtcaagtaccggaataagtaacgcatcaaggtcttcgtgctgagcgataacttgagtaagtagttcgtgataatagttcaagtctaccttgtgcattgcattttcagcacgtgtacgcgcttcaatttcatgtacagggttgtgactcatttgccactcataaataccttgtacagcaaaacgacgtgctttacgttttgctgcataagcggcttgcagtgtttgagacatgctttaaattgcctttaataaattaaccatttcaattgcagttaaagcagcttcgctacctttgtttcctgcttttgtacctgagcgttcgattgcttgctcgatgctgtcagtagttaatacaccattgataacaggcaagctgctttctaacgcaactacacctaaacctttcgcacattcaccagcaacaaagtcaaagtgaggtgtgctaccacgaatgactgcaccgagtgcaatgatggcatcaaactggtttgatgtagctaattttttagcaacgatcggtagttcccatgcgcctggagcgtgaataacagtaatgttatcttcatttacgccatgacgttttaacgtgtcgatcgcgccttctaataagtgttcaacaacaaaactgttgaaacgacccactaaaatcgcataacgtccttcgcttgcgagatgtaataaaccttcaatacggcgaattgccatagcaacctcgattatttcgttgtgatttgatcagcagtgacatattccactacttctaaattaaagccagataaggcattgaaacgcaatggtgagctcagaagcttcattttttcaacacctaaatcacgcaaaatttgagcaccaacaccaatcgtttgatattgatgtgaaagtgctgcattggatttcaccggttttggcttagttaaatcatccaacgctggtcccaagtcttgcaaatgatcttgtccgatccagactaaaacgccgcggtcacttgctgcaatcgtttgtagcgcacggtctagattccaagccggttcaccgtcagctttatttagcttaagcaaatcgcgaacaggactaaaaccatgtacacgtaccgttgtaacgccttcttttggctcacctttgactaaagccaagtgaatgtcagggttacctatctcacgatagcgatagagctcaaatgaaccatattctgtttgaatcgttctttgatccaaacgttctacagtttgctcattggtcatacggtagtggattaggtcggcaattgtaccaatttttaggccatgcttctcagcaaaaatttctaaatctgcgcggcgtgccattgtgccatcttctttgatgatttcacaaatgacagatgcaggctcaagacctgccagtcgtgctaaatcacaacctgcttcggtatgacctgcacggtgtaatacaccacctggctgtgccatgagtgggaaaatatggcccggttgtacaatatcggttggtttggcatgtgctgccacagcagcttgaatcgtgtgagcacgttctgctgccgaaatacctgtggtaataccttcagctgcttcgatagataacgtaaagttagtaccatgctgggcaccgttctggccaaccatcagcgggaggtttaattgtttacaacgttcacggcttaaagttaagcaaactaaaccgcgtgcatgtgtaatcatgaagttaatatcttcagggcgtacatgcgttgctgcgatgacaaggtcaccttcattttcacggtcttcgtcatccattaagatgaccattttgcctgcacgaatatcggcgacaagttcttcaacacgactcagcggcattcgctttcacctttttttgtcgtaagacaatttctattgaataaatttcgcatagtttacgctgtttatagaattttgcctatgattctgatttatccaaatttacggctcaacatcataagtccggatttatttagataaataaatcataaagaaataaaattatttaaaataaataccataaatttagataaaaaaacctagccgaatggctaggtttaaatgcgcacaataaatttttaagatgctgcactactcgggctgtcattttgaggaattgattttttacccatcaaaatttcagttcgaatattttgtgcaagctctgcacattcagcattcataccattgatcataaatgcatgacgagtcatgacattacttgggttaggcattgcaacaagctgatagctgtcttgaattgctttaagctgttcattatcaaggtagagtgcagattctttcgcatgaagatgttgcgctaaacgttgagcagcttctttggcgtcaatttgcattgcttctacggcattacacacggcactgcgagtttgtagtgcaaagcgtttatcttcacggtaacgcttatataaaacgtctgaaagcaattggaaaaccgtacctaccataagtagacactctacagcgtgtggatgtgaagtcgaaatggcaagtgttgcgccctctgcatgaaactcgtctacgacatcaatatcagtcgctttcaaatgataatgcttcgtacatagctcaatactcttgtttaagaagagctgacaaagtttaaagtacggtacagaaacagactggttaacactacttaataactgtttagggtcataaaattgaatattaagtgccaaggtattttggtctgtagactctaagcttttttctggttgcgagcgaacaattggtttagctttagcttgctgctgagcttgagcaaccaaggtcactgtattttgtttttcaagcgcgagagcttgagttaactcttgaatctcatgttttaaacggttttcttcgttaatacgggctaagtattcgctacgcgttgggcgagcaatggcgcggtaagccagccataataaaacatgtaaaaacagtgaagctaaaatcgcaagccattgggtacgaagaatttccccaatacttggttgaattagtgtgatttcaatagaaccgacttttttctcgttttgaagcgcatcacgaacaaaaatttcaccttggcgagtttttgacatgccgcttgttgccaaaacttgtttattggcgtcaagaatacggatagatgccacacttggattggtcgcatagcgattggcaatcagagctaaagagaccgtattggcaggttcaagctcagataagctgtctgcaacgagttgactggtcatgagctgaccttgactcgcacggttttcattgagctggtgtgtcgttgcaatcaccaataaaaaggtatgcaatgcaaaactaatgatcagtaggctagcaaatagcccttgtctaggcgcaatcaagttaaacttccaaggcaattatattgaaattcgattatgattcttacaatagttgtcactcagactagagtcaattcatgcgagaaatcattcttatatcctttttaggaccggaccaaccaaaccagtttacccgattaatgcaagtactatccgtacattcattgcaaatactggatgtaggtcaggctgttattcataatcaactgacattgggcattgtggtcgcctctgaaaatgaaaccgcgaccgcgctggcaatgaaagagattttgattttagcacatgatattggcttaacagtgcgctttaaacctatctcgggcgcagaatacgatcaatgggtcagcgaaggtggacgaactcgttatatcgtcacggctttagcaccggaactcactgctgcacatttacaagccgttacacaaattgtgtctagccaaggctttaacatcgaaactgtaactcgtttatcagggcgtgtagatcttgaaaaagatagcacattgcctcgccgtgcttgtgtacagtttggtttaagcagtggtccgactttagatgctcaagctatgcgtgcagcttgtttgcttctttcaagcgaattaaatattgatgtggctgttcaggaagataacgcttatcgacgtaaccgccgtttagtctgcttcgatatggattcaactttaattgaacaagaagtgattgatgaattggcgcttgaagcaggggtgggcgagcaagttgctgaaatcactgaaagagcgatgcaaggtgagttggacttccagcaaagtttccgtgcgcgggttgctttactcaaaggtcttgatgcgtcagttttacctaaaattgccgagcgattgacaatcaccgaaggtgccgagcgcctcatttcgactttaaaagcccttggatataaaacggcaattttatctggtggcttccaatattttgctgaatatttacaagctaaattaggtattgatgaagttcacgctaacgttttagatgtacaagatggcgttgtgactggtgaagtaaaaggtgtaattgttgatggtgcccgtaaagcggagttgctgcgtgagctggcgaacaaactcggtatttcactagagcaagcgatggctgttggcgatggcgcaaatgatttaccgatgcttgcgattgcaggacttggcgtagcatatcgtgctaaaccactggtgcgtcaaaatgcaaatcaggcgatttcaagcgttggtctggatggagtactgtatttactcggtatgcatgataaagatttaagccgtgcttaaataatagtgaacaatcattaagcgctgctcaagagtagcgctttttttatgcagaatagtcataaaaacaagcaagttatgacaaaattatgcacagaaaaaaggcaataaaaaaaactgaaaaaaacttattttgagacaaaaaaacagcatagttttttgtaatgacacgccagaattgatgccatataggaagtagaacttttttaaatttacaaaaatgtaatgacaaaagaatgttgcgacaaagtatgtcgcatcgacaaataacaggtctttttttctaaaaaaaacatccataatgctttctaagcttcaacacaaatcatgaattaaagttgtttttggaatgaggtctggtgttcagaccgaatgtttttagacgttttcattaagacggaggtttctatggtaacagcgaattttgccgctatcgccggactcagcttaattgctgtcgcgcttgttgctgtgttcttttctccttaccgtcgttggcttggttttatgcttgcagggatgtttttttgggggctattggaagtggtccgttttggagttcaagtcacttttgaaatgccagtcacatatagttatttaactgcactaagtctagcgatggtaatggttacatttgttttattacgtgaggataaacaggcacagaaggctttggcaaatcgccaatatatagaacacacgccagtatatgaagatgatcagcagcaatgttctagccgataattcaattgttatctaacggtaaaaaggtatgcacagcatgccttttttatttacgaaaacatgatttttattatacaaagcatttattaaaaaatagccagttatgctacgatagactggtctgttgacgtttcatatatagattgcgttgccaattagaatatcatcagtcgatgcacgaaacaggcaatggtgagtccttgctgagttttgccccaaggttttcataaaaatacaataggcgtgaatgttcatgaaactttcttctatacctgtagtcaagttaccacttgttgatgtcagtacagacccgttagatttattggtagcaggtttggcgctgcgtatgaaacagttggcacgtacaagtcctaagtttattgagctagtgcatgaccgcgcattccgcattcaaattggtactgatttaggtgtggctcgccaaattattattaatcatggtcacatcgatacagttgctggatcacctgaaaaagctgactttattttgcagtttgcagatagcgaacaaggcgtaaaaactttactcaaaggtgacccaacagcatttatgacgggtatgcaagacggcagcattaaaatggaaggtgatttcagcttgctcgtttggtttaaccaagcagctaaattgattccaccaaaattaccaaaaccagtaaaagataaagtacgtcaagcacgtgcttttattaaagaaaaaactggtcgttaagatctaaaaaaaactcccgatcgggagtttttttatatctatgcttcaacttctaaattgaaagtgaccggtccatcattaatcaaatgaactttcatgtccgcagcaaaaatacctgtttgaacattttcaaactgtgaacgagtatattctactaactgttcatatagtgcttttgcgtcgctaggcggcatagccggaccaaagtcaggacgtagtcctttttgcgtttgagccattaaagtgaactgtgaaacaagcaggactccgccatttgcctgagatacattccagcccattttgccttgctcatcatcaaaaatacgatatttcaaaatcttgtcgatgagcttttgtccggtggcgagcgtgtcgtctcgaccgatccctaaaaaaaccaataagccatgctggatttcaccggtcgtttcaccgtctactactactttagcttcaagaactcgttgtattaaagcgcgcattgttagagaaagtttctgcaattaattgaatggatgcagtttagcagaaattaaattaaatgatttttaaaaggaaatttcatggaactgcaacaatggtataaaagctcgcaattcatctagaaaaatatgctttaatgctaagaagcaagcgaataatcattgactatgtctccaattatccattctttacttgatacagacttgtataaatttacgatgctacaagtggttctgcataaattcccgcaaacgcatagcgtctatcactttcgttgcagaaatttagaagatactgtctatccattagtggatattttggatgacttaaacgagcagctcgaccatttatgtaatctcaaatataaagaagacgaactacaatatttaagaaaattacgatttattaaaagcgactttgtcgattatttagaattatttcaactcaaacgccgttttattcatgcgagtatagatgaggaaggacgattagacatccgtattgaagggccaatggttcaggccatgatgtttgagatttttgttttagcgattgtaaatgaattatattttagccggattaaaacagatgaagtctgggctgaaggcgagcgtcgtttacaagcaaaacttgaattaattcagcaatacgaaaaatctcaacaaccgaatgatccaccatttttagtttctgattttggtactcgccgtcgttatagttttgaatggcaaaaacatgtagttgctgcatttcataacactgtgccaaatgtgttccgtggtacaagtaacgtcttgcttgccaaagagttaaatattacgccaattggaaccatggcccacgaattcctacaagcgtttcaggcgcttgatgttcgcttacgtgactttcaaaaagctgctttagaaacgtgggttcaagaatatcgcggagacttaggaattgctttaactgacgtagttggtatggacgctttcttaagagattttgacttgtattttgccaaattatttgatggcttacgtcatgacagtggtgatccgtacgagtggggtgataaagcatatgcacactatcgtaaattaaaaattgataccaaaaccaaaatgttgacctttagtgatggccttaatttgccaaaggcttgggaactacaccaatatttcaaagaccgttttcaggtgagtttcggtattggtactaatttgaccaatgacatgggccaaacaccgctcaatattgtattgaaactggttgagtgtaatggccagtctgttgctaaaatttcggacagccctggcaaaactatgactgataacgatacattcttggcctatttgcgtcaggttttccaaatcgaagagctggatgaagcaatttaattacaatagagcttaagtgcttggcagccacttaagacttgagaattttaatatctgattttctgctaaacactagcataaaatcagagtttgatagatataagcttatgctaagatgaaattaagctggtataaaaagtaaccatgacgatgacactccctgattttaaactcgatttattaatagaagcagaagagttagtgccttatttaggcaatgaatatatccgtattgttgatttgagccgtacatcagtttatgaacagctccatgttccgcatgctattcacttacagcctaaatggttagttgctcaacacgaagaagcgacaggtgttttaccggatgaagcaggtttacaagcgcttattgaaaaattgaatatttcaccaaatcaccatgtggtggtctatgatgatgaaggtggagcatgggcagggcgtttaatctggaatctccattgcttaggttttacccgtacaagtttaattaatggcggaattcatgcatggcttggtgcaggtttacccaccacagccgaggttgaagaattacctcgagttgataacttaattcagatcgatttatcacatgctgctcagttccgagtgaactatgaagaactacgcaaacaagttgagcaagaaagtgtgcaactctgggattgccggacgagtgatgaatatagtggcgtccgtttagcagcgcgacgcggtggtcacattccaaatgccctccattttgaatggagtactgcacttaatcgtcaaaatcatctaaaattgcatccgcttgaacgcacgcggcagcgtcttgaacaacttgggttcgatttaaaacaacctgtagtcgtatactgccagtcacatcaccgttctggtttggcttatattctggctagacttttaggttgggaagcaaaagcctatgatggtgcgtggagtgaatggggcaatcgcctcgatagtcctatcattactggagaatcgccgtcttgagttttacatctcgcttaaaaaaagaattatttattaaggcacaaaatcttgttcctcagcatcagttaagtcgtgtagtgggtaaagttgctgcaagtgaaaatccaattttaaaagctgctgttattcatgcatttaaaaccaaatacggcattgatttatcaattgctgaacaaggcaatgcactgaaatataaatcttttaatgatttctttacccgtgccttgaaagatggcgtacgtttagttgatgaaaatccggatagtattgtttcaccagcggatggcgcgatttctcaaattggtaaaattactgcaggtgaagtctttcaagcaaaaggtcaaagtttctctgtagagaaactcattggcgatccacaactggctcagccattccaagacggtgagttcgcgacagtttatttatcaccgcgtgattaccatcgtgttcatatgccgtttgcagggacattaacagaaacgttatatgtgccaggcgagctattttcggtaaatcaggtcactgctgaaaatgtaccgggattatttgctcgtaatgaacgtatggtgtgtttgtttgatactgaacttggccgtatggctgttgttctagtaggtgcgatgattgttgctggtattgaaactgtggcaacaggcaaggtaaaaccttcaggccgtatcgaattacaacatcatcagttaaagctagagaaaggtgctgagcttggacgtttttatttaggttctacagctgttattttatttgaaaaagataagatcgaatgggagcaacgttttaaagctgagtctgtagttgtaatgggcgagcgcatgggacataccatttagtccattatattgctccctaaaaacaagtaaaccctgactttaattattcagggttttttttgatttaaattatataaacctaaaatatataattatgttttgatttatattatatagaaatataattattattaagtgatctaaatgagtacgttatataagctagtgtataaatatgtatctggagagagcaaaaatattaatatgactgaaaattaataaataaaaacagaatgaaatatttaagttagacttaagtcgaggttttaattttatttgaagataagttattaaatctaaaaaaattatttagtttttttataagcatgaagcgctttttagatattacacaactttagccttggcacaatgcttgctaactattcaggaccttactgtaattttcatattttttaggttctgaaatcatgttaaaagttaaatgtctgacagcttcagttttatctgtactttgtatttcactcactcatgccaatgattttaaagttttaaatcaaatttcaaaacaacctactcaacttcaaactggggaatataaaggtaattattatgttccatctactttaaataccattacatggggctatttaccaaatcgagatgctaaacccgtgcttactgttccgtcgggtagtgttgtgacatttgatacggtttctcatgaaggtttgcttgaagaccaagggcgtaatgctgaaaagttctttcaatcgaaaggtgtcaaatctaatgaaatcttggaagatgcaaaaacaattacgcagtcaaatttaaagcatgattttcataaagatgggccgcatattgtgacaggccctgttgcaattgaaggcgcacagcccggtgatattttgaaagttgaggtacttaaagttgagccgcgtgttccttacggtgtgatttcaagtcgacatggtaaaggtgctttagtaggggagtttcctaaaaaagcaaagcaagaaaatgcatcggctgagcatcctgaacgttatggaaatgtatcgattttcactccaattgaaaaaaatgctaaaggtgaatacgaaggagtattaaaaacagaatctggtaaatcaatacgttttccgctgtatccttttatgggaattatgggggtagcagccaatacgtctgagcctgttcactctgtaccacctgcaatgtatggcggaaatattgatattaatgaactaggtgcaggttcaactgcgtattatcctgttcaggttaaaggtgcattattctatacgggtgatagtcatttcgcgcaaggcgatggggaagttgcattaacggcactagaagcttcagcccgcgccacgctgaaatttaccttactcaaagcaggtaaggacaaaataccgggcaaagagctaaaacaacctttagctgaaaatgctgagttttggattacaccaggacttgatgaagatcttgatgaagcgatgaagaaatctacacgtgaagccattcgtttcttaaaccaagaatacggtattgatgaagcgacagcgtatgcctatttaagtgccgcgactgattttgaagtttcacaagtagtagataaaaccaaagggatccatgcaaaaatcagaaaagctgattttaaagagtttgagagtaaataattgggatgacctaagcttggtatttaaaatattaaataccaagttaattttattttaactatttataagttttatatattttataattaagtataataaatctcacatatattgattagtataaaatctaatgcaatcacttccaaacgttctactatatcttgctgctttattaacattgtgtgccgcattacttcattttgtttgtgtgttctggggagcaaatggttttcggtttttaggggctgggaaaagtattgtccagatggttgaaagaggacactggtatcctaattttacagctataactgtgggcttaattctgactgtatgttctatgtatgccttctttgcagcaaagggaatacaggtattaccttttacaaaaattattttgtcgcttgttgcagcagtgtttcttatccgtggttttgcttttccatggttaaagtcaaaatttgtcggtaatagtgatttattttggtatgtcagctcagccttttgtttaatattgggcgctttatatgccgcaggcgtatatttaatttgaaatgaatatattctaggtgaactagagtgaataattttaaaaataaaagggagctgcgctccctttttaattatttagtccaaccatattttttgaaaatagtattgccctgctgtgaagatagaaactctacaaaacgtttagtctcagtgtcttttaaactatgtttagtcaatgctacacctgtgtcgcgatagacaactagctccggttcgatgggaataatttgtccaacatctgggttactgattccccaaatattaaagactaaccaagcatcatagctgctattttcttcccagtttttcttggcaatacctgtgttggctgcataggtggcaatattctttcgaaaagcttttgttaattgaatatttccggttctgccagcaatatcttcccacataccgacttgacctgcaccatgtgtaactaaaaccttaacgccagatttagctaggtctttaaatcctttaatatttttaggatttcctttgcgtactaaaatggctgcggggcgtaaatataaaggttccaccgaatcttttataatttgctcagaaaaagcattttcaaaatcagacatcatggcttcggaaccactatagataatatctgcatctagtttcgctttttcagaccattgagcagtaggaccagaattcacatgaacagctatgccggttttattggtgaattgtttggcggcttctttcatggcgggtgctgggccacccggaccatatacttgtacgtctgcaaagctatggatggatagagaaccgagaataagaaaaatcaggtagggtataaatttttgttttgacattttaatcgctatagtaattaagaaaatatcagcatatattttttatcattgaaattggattaatttttgcaactatatttatactggatatttttaaaatatagttttattaaatttcaatgattatatttcaatatatttttgaccgaatataaatatagataattttatggtaatttatattttataaattgattatttaaatagatgtaatgtaaataatagaggagtaatcccttgattagaaaaagtaattctttattaaaaattttatttagcagtatttgtttgatatctggttctgctatggctgctccaattacagatttgagtaagcaaattgtgagtgaaaaaccgggctcaatactttctatagcgcaacaagatgagacggatttatttctgcatgcagatcagcgcttattagtaaattatcgtagtcgaggtgtgaatggcgagcctatcgttgcctcagcgtttattttattaccgaaaggaacaccaccaaaaaatggctggcccgtactagcttgggcgcatggtacaacaggagtggccgatacttgtgcaccttcgggtgattatgccggtggaccagttcactcatatcaggaagttgcttcaaaagcgttagatggttggcttgcacgaggctatgcagtagtcgcacctgattatcaaggtttgggtactttaggcgcacatccctatatgaatgccaagagccaactgcatacagtagtagatgcagtgcgggcgttacatatgcttaagccaaaagattttaataaacagtggttggtaatggggcatagtcagggcggggctgcggcaattgcagtgtctgcctatggtcaaaaagatgctcccgaactagatttaaaaggggtaattgctcttgcgccaggtggctatcaatatgaaggcattgcagaatatgtgttgagtcatccaaacccagaaccaaatgtggcagcatttttcccaattgtgttattgggagcacaagccgcagagccaagtattattcctgagaatttagtcagttcagaaatgggcaaggtgctaactcaagcacgtagccgttgcctatctgaattacaatcagacttaaaaaaatctccttctagcatatttcgacctaatgtagatttaaaacctcttttgtcttatttaaaacagcagtctattgaaaatatggtgccgactgtaccattaatgattgttcagggttctaaagatcatttagttgacgctagagggacatacgcttattaccaacagctatgtaaatcaaaaaaaccaactatttatcaaacgattgatggtggagatcatcgcgatgcactacgtcagagtcatacttttgccactgactttctaaaccttatagagaaaaatcagacgaaatcttattgctcgaattttaaataaataggtttaaatcttataaaaaagccgacttttcatgagtcggctttttatatttgaagaaagatgattttaagtcatgttatagagtctttcttttggaaaaactgcggtaaaggttgatccttcattttctttagatagcacgtctaagtaggcgccgtgttgcatgagtacgtgttttacaatcgctaagcctaatcctgttccaccggtttgacgactacggtcgctgtccacgcgatagaagcgttcagtcagacgtggtaaatgtttagggttaatgccgataccggtatcttgtacgctaaagtaagcatgctcaccgtcatcgtgccagccaatggtaatggttccgccttttggtgtgtacttaatggcattagtaattaaattactaaatgcgctggcaatttccatgtctgaaccgatgaggtcacagtggctatcaatatgtaaattgagtgtatgcccataatcggcattgtaggcctgagcatcatcaaataattgattcattaagctcggcatttcaataatctgattttttgcgattttcttattattttctaaatttgataacaatagtaaatcattaaccaacgcattcatacgtttggtttgagattgcatctggtcaaatgcacgtttccagcgtgggttaatatcttcttggtcggtaaaggtttcgatataaccactgagcacggttaaaggtgtacgtagttcatgagaaatattatcgacaaagtctttacgcatttgctcaagattatgcatacgagttacatcgtatgccacaagtaagcggctttccccaccaaatcgtgtgagcttaacctgtacataacggtcatcatcaagattcgaatggagtttaatcccatcgggtgcctgatcaatattgttaaaatattcaataaaagtaggctggcgcaaaatggttaataagttacgaccacggtcaagtggactaattcctagtaaacgctctgcggcggggttccaccattcaatttgatgttgatcatcaatcaagactaccgcttcagcaagtgcaactaatgaagattgagcgcggtcaataagtcctaccatttccgcttgaacaatacgttcttggcgctgagcacggtaaacgttaaataataatgccccccaaattccgttgaggttcggagggacatcgtatggattattggcaatccagtcattgaccaaatataaagaacgcaactgaagtgtaaaaaacaccacaaaggcaataaaaatacagctccagaaatacccaattcctaaaccgactaaacctgcaataatcaggaaaaataataaaagtcgtaaatcttgtttagcaaacgtccataaactactgtagcgggaaagcttttgttcacgtacctgttcggggacggggtagggttcatacataaattttggttaacctgcggctaaatctgcacgtgttgagaaacgataacctgtaccacgtacagtctgaacaaatcgatctacaccaaaaggttctaagactttacgcaaacgacggatatgcacatcgatagtacgatcttcgatgtatacattaccgccccacacctgatcgagcaactgggcacgtgtataggcacgttccggatgggtcataaaaaatgcaagcagacggtattctgttggtcccatatctaaaatactgttaccaaagcttacgcgttggcttacaggatcaagaattaaaccattggcatcaattgttttttcaccgcttaatgcatttgctcggcgtagaacagctttaatacgagaaaccagttcacgggttgaaaatggtttggtcatatagtcatctgcaccagcatccagaccttgtactttgtggtcttcttcaccgcgagcggtcaacataatgacaggaatttctgctaagttttcatctcgttttaaacggcgacataagtcgaccccacttacgcccccgggtaacatccaatcgagcaagataagcgccggacgttggtcgacgataatttgatgagcctgtttggcatcttctgcctgtaaacactgaaagcctgccatgtccaaagaggtatggatcatttcgcggataggaagctcatcatcgacaattaaaatatagtcatctttcacagcgtaataccttgtagattttaacggtgaaccgttttgtagttatgacaggcttattacaaagattaattatgacaatttcattgcagaaaagtctataaaatcgaatttagcaataatttgtgacaaaaatacggcaagcgcatgaccaaatgatgacaggtaggtataaattttcttataaccattcagtgtgttacaagcttatctcaaacgaggtttttaaaacaaaaacactgtcaaaaaactttaatattattttgaaactttcgcgagcaaagctaaaaaaacgatacggcaggccgctaaaacttgctctagagactgcttaaacccgcccatcacccatcgaacggcaatttgtgtcacgtatccatttaaaccagtagcgattaatgagagttcattttcgttatgctggatttgcggcatggttagcatcacaaaagcttgaatcatacgatcaaactgggcgagagtttcctgaatggtggcctgattatgtaattcttggaccaaaattgcatcgacatacacaatacgagccaaacgagggtcgtcttttaaagtactcagtagagcacgtaaaccagcatcgaccatttgctcagggtctggagccgctttaatgacggcttgcatcaagttttgctgtaattcttcaatcatttttaaaaagatagtctggaataaatcttcactctttttaaatgattcataaaaataacgttcggtgagttttgcttcttggcagacatcttttaccgtcacggaaaaaaagccaagggttccataagttgcaataccggcttcaatgagtttttcgcggcgtgcctctttgcgctcagacagagataaccctttgaactgacgttctttactcacagtttttgttttctttttactggttgagtcgtttgtcgccataaataaatggtttcctaatttatcggtttttcggcaaatatgagccctatgataaagccgtcagcagaattgtgccaatctatctgaaattacagtgtactatattgacaatgtatattgtcaaaattatattgaaagagtctaaattgcacatgcaatgaaccagttgtgcaaatcgaaaaacaaaggatggacaatgaaaaattttaaaaacaaagtcgctgcaattacgggtgcgggttctggcattgggcaacaattagcaattcttctggcaaagcagggctgccatctttcattaagtgacattaatgaaaagggcttagagaaaactgttgagctattaaaaccgtacagtaatattactgtaacaaccaagaagttagatgtttctgaccgcgaggcagtaaagcagtgggcacaggaaactgttcaagatcatggctgtgttaacctgatttttaacaatgcgggtgtagctttaggctcaactgtagaaggtgcaacttacgaagatttagagtggattgtgggaattaacttctggggtgtggtttacggtactaaagaattcttaccgttcattaagcaaacacaagatggccatattattaatgtttccagcttatttggtttaacggctcaaccgacacagtctggctataatgcaactaaatttgcggtacgtggttttactgagtcattgcgtcaagagttagatattgaaaaatgcggcgtaagttcgctatgtgtacatccgggcggtattcgtactaatattgctaaagctgcaaaaatgagtgatagtttgagtagcttgggtatggacccaactaaatcgattcaaaactttgacaagttattgcgtaccccaccagaggaagcagctcgtcaaattttagatgcagttttgaaaaataaacgccgtttactcatcggtagcgatgcaaaaattctggatgcattccagcgtttattcccaacgggatatcaacgtgcttcaaccattgtaaccaaatggatgaaataaggtttaaaagaaaaaagccatcaattgatggctttttttataaggtttaatgcattctaaataagaactttgatcttctttttcttccagataaattgataatacaagccttgaataatacataaactgacaaatgccaacgcataggcgacccaaatgcctttaagcccccacatcgaactaaaccagtaagcacatggcatttcaataaataaaatggcagagatgttaatcagcatcggtacggttacagtcccactggcacgcataattgatgcaaaaatggcacctgcaccaaagaataaaattgcccaaagtacaataaataaaagctgttgccctaacaccaccacagttggatctgtgatgaataaagccatcaaatattttgaaaatagatagccgagtgcaattaaggcacctgtaaataaaaagttcattcccaaagcggtgcgtgtaacacgtgcgagtaggtccgacttaccagcaccaatcgcttgtgctgcaaagattgaggccgcgatagagatcgaaatcgctggaaattgaatatagttgagtacctgattcacagcaccatacgcagctgtggcatgagctccgaaacggttcactaaacccacaatgactaaaccggccattgaagtggtaatcatttgaataccggttggaacacctaggcgtaaaatgattttactcaatgccgaattatgacggatatgttgcaaaagctgacggtttggccgaagtggatgctttttcttatttagataaatcgcaagaaaaattaagatggcaatataactaataattgacgctatagccggtgcaataataccgagggcaggaaagccaaaataacctttcagcagaattggtgtaataattacgccgatcacgctggttaaagccagtgcaagtaaaggggtagtactatctcctacaccacgtaaaattgaggtatagataatataaacaaagagaagaggactacctgccaacatccattgcacataaggcaaagagaggtgcatcaccttcgggtccgtacctaaaagttctaaaatgtcgtgggcaaaaaacacaccaatgattgcggtaatgataccgccaatgatggtcataaatagggtagaacccaccacactttgaaccttttctatgtcttgtgcgccccaagcctgacccactaaaacagtggtacccgttgaaataccgataataaacgcaagcagtaaaaacaaaatggggaaatatacagaaactgcagcaatggcatcgacccccatcatttgtccaacaaagatggtgttaatggtaccggacaggttttgcaagatattggttgcaatcaggggcaataagaaaacaaaaaatgttttccaaagattttgctgatgaattaaagactgtcttggtggcatgtattctccatcgcccatctctttgatgagcgggtcggatattcaacttagcatagttgtagggaacttcttgtagtatttttactatgctaagtgactaaatttcttaacattgattcagaatttctcctgctttttgcagtgtttcatcattttttgcaaagcagaaccgtattaggcgtaaagactctggggcttgttggtaaaacaccgaaacaggaatagccacaatcttatgttgctcggcaagaaactggcacatttccacatcgtttaagtcaggtctaatctggctgtaatcaaggttttggaaataagttccttgcgatggtttaagcaaaaaacggctattgtgaatcgcctgattaaatcggtctcgtttagtctgataaaactgtgaaagttcctgaatatgttctgggtattgctgcatatattgcgcaagcgcaatctgacaaggtgttgtgccacagaaattaacatattgataaatctggcggaacaaacgcattaaatcaggtgaagcaacacagtaaccggttttccaacctgtgacatggaaggtttttccaaaagaaccaatcacaaaactacgttctctgagctcagggaaatgcaacgcgctaaagtgttgctgaccatcaaaaactaagtgttcgtagacttcatcagataaaactacaatatttttatcctgaattagttcaatgagttctaaccagtcttgtttggaccagattgtacctgttggattgtggggagtatttaccacaatcatacgggttttatcgttaattcgatctttaacttgttgccagttcaccttaaagtcaggtgcttgcaaggcaatatgtaccgctttaccacctgctaactcgacagaaggtccatagctgtcataactcgggtcaaaaataatgacttcatcacctgtgttgatgcaggcttgtatggcacagaaaattgctatggttgcaccgggcgtaatcgtgatttgagttacaggatcaagttgaagatgatcacgttgttgaaattgtaaagcgagctgttcacgcagtgcgagaatgccatcaccaggtgggtactgattgtgtccagccaaagttgcctgagatagggcttcgagcaaagcagggggtgcaggaaaatccgggaaaccctgtgaaaggttaagtgcacccaagcgctgtgccattgccgtcattgtactaaaaatagtcaccccttgtgcgggcaatttggactgaagctgtagcatattgttctcttaaggaaattattaacgttataaaattgattcaatcgctgctcgtattacacctagagttaagccgataaatgcacctaccacaacgccattcacacgaatcatgtgtaagtcgccaccgacttcgttttcaatttttccaatcatttcacgtgagtcccactcatgaatgcgctcactcacatagcgtatgattttatggctatattggtccgtaaagttcatggcaagtcctgtcatttctttgttgagaacttcacgtacttttacattttggacaaggttttcacccaactgctgaatggcagctctgaggttcattgcaataccagagtcttctttcattaaatcttctttaatggcatcgcataaaatagtgacagcgccactaatgaaatttaagacttgaggactatctagcaacgcatctttgccactatttagacgttggctggcaatactctcagggtttgccaactccagcatgagcgagtgggcaatagtttcaatttcctgtcgccatgggtgttcatggtcagccagcattgattctactttttcaaccagtgaatcaatggtgcgctgctgaacatcaataccgatccagcttgcaccttttgcaagagaccagacgcccagcgctttaaacatttttcttgtcaattcgcgagttttatccggattttgtaccacccactcatgcgcgatatcgagaccacgttgcagtacatcttggtggaaatcattttccaatactgcacgcagcatttcactcgcaagtttattgacttgagtgttacgcacccattgcacactgttgttttgcacgaaattggcaatttgttcttggctaacaaattcaaaaactttaggtacagtttgctgaatgagttgtaccacttgcgtattgttttgtggactggcaagccattggccaatggcaagacttaaatcggttttttctaggcttcgttcgaccacctgaggcgacaggaagttttcctgtacaaatcgacccattgattcggcaatacgtgccttattacgtggaataatttcagtatgatcacgcaaaaacttagggataggaagcttaccaaatgggtttcgaaacagaacggtaatcgcataccaatctgctagtccacccactacaccagcttcggcacctagcattaaaatatgaattaagtctgtgtactctggcagaaagcgattggcgatcaataacccaatccacagcaccaccacaataataagtgccatcgtagcgaaatatttgctgcgcttcagattgggtgcatggtgtacttcttctgccatattcatacggtcatcctattcatttttgttttactggcggctcaggtggcggcaacaattctcctgtcgggcttaaaccatatttttgtccgatagatttgagaattaacgttgcatcaaaggcatcttgaggagcctgcttttgatcccgataacattcaatagtatacgacacttgaacagggtcgatattgaccacttgtgggaaaccatagaacggatcatgccagaaacccggatagcggcggtagtaaccatatgggtaaaagcttggtgcagatgggtaaactacagcttgacgcggtggcttttggctttgattacttgggtcgttcagcactttaaaaaagcggaaacctttttgtactgtagtctgtgctgatttcactaaagtaatttcttcggctgctccatagctcatgtttgagtcagcttggaagctgattcgaaacgtttgagcatttaatggataggccgaaaactggccaagctgatcgaaagtttttggtttgctgggtatagttgaacaagcacttaaagttatggcagtgcctaaagctaaacaaagagagagatatttcatggtgaactcccagctgagcataaaagaatggatgcgtcagcattaaaaatagagaagtcttaaaaactactgttcggttctaataaaaattcggtttcctctggtgttgagacacgtccaaggatggcattgcgatgaggataacgtccaaagcgatctataatcactttatgttttttctcaaagcttaaattaatttcattgccaaggcgttgaaataattttaaagcaaactcatgaattagcttcgattcactatgcataaatggcatgtacaaaaacgagcgctgttctgggttaagttgtgcatcgagttgcaaactaattgcttcttgtgacaaggctaaagcaagaccgtcataagcaaaagattcgggttgatcacgataaatgttgcgagaaaactgatctagcacaataatctctgcaagacgaccttctggtgttttccgccaagaccaaagttctgctcgagttgcctgtcgatgaacgtctgtaaattgatcacgaatttttgcgtcaaaatcctcactttttgcaaaccagagtgaacggtgttcaggtgaaaaccagaagtttaaaatgtcttgatcgttcatgatattgacaactctttagcaattattcttcaataaaatcacaattctttcgtgtcttaaataacaagattgtgataaaaattgccaaactgaaatgatgtgatcatatcaatagccgtatcatgtcacgattttgtatatagtgatcttttataagcgagcaaatgcatgagtcaacccactacaccatctcaatcagttattcctgcttgggtggattcgtcgctactacaaggcatgttacgtggaatagaacgtgaaagcctacgtatgcaaagtaatgggttcttatcacaagagttacatccaaaagcattaggttcagctttaacacatccgaaaatcaccacagattattctgaagcgttgatggagtttattacttcaccacagccaaccattggtgatgccttgcatgagctcaccgatattcatgcggttgtgcaccgtcatttagaaaatggtgaaaagctctggccgttgtctatgccatgtatgctagatgacaatgaagaacgtattcgtctagctcaatatggcacttctaatattggccgtttcaagacgctttatcgccgtggtttaggtattcgttatggtcgccgtatgcagacgatttcgggcgtacactataatttatctttccctgattctcttttttctgctttgcaggcacatgaaactgacgaaaaattaaaagcacttagtctgcaagattatcgtagtcatcgctattttggacttatccgtaactttattcgtttaacgccactggttatgtttttagtgggagcgagcccatcggtttgccgttgttttctgacgggtcatgaacatcatttgttgcctttaatcaaagggtcatattatttaccgtatgctacagctctgcgtatgggacgtttaggctaccaaaactcggcacaaaaaagtttaggcattcactataacaacttaactggttatttggatggtttacaaaaagcagtacattctccatacccgccatttagccgtttagggttaaatgatgcctctggtgaaccattgcaaattaatgatcatgttttacaaatcgagaatgaatattacagtctcgtgcgtccaaaacaagttcctcaagcgggtgaaacaccgtctcaggccttgaaaaatcgaggagtgggttatgttgaacttcgtgcagtggacgtaaatccatattcggcaattggcgtcaatgaaacaacagcaggtttccttgaggcattagcgctttattgtttattaagcgatagtcctgaactgttatgccctgagcaagatttgattgagaaaaaccagacagaagtggttaatcgtggtcgagcaccaaacgcaaccattactgatttaaacgggtcttaccatattgaagattgggcacgtcagcatatttctaaaatgcaggattgtgctcgcttactcgatcagacctatgcaacagatctatacagctcggctttggctgtgatgcaagaacgtattgatgaagtagatgaaacattatctgctcatgtgattgatgacacattaaagcatggtggaacctggagctttggtagtcatatggcacagttacatgctgaaacttatgaaaagcatgagattagtgcagagactttgcaatattttgaacaattggctgtgcaatctttacagcagcaagaacaacttgagcaagatagtcagatcagttttgatcaatatcttgaacaatatagataaaaatgaggttttacatgcgattaagttaccgtttggtgagtggactgcttgttctggcaagcattgtcggcatgtcttttgcgttgtatttggaacatgtaaaagggttggagccatgtccgctctgtatttttcaacgtgttggcttaatggcaatgggttttgtggctcttattgcgtttttgcataaccccgtttccaatgcgattaaacgcttttatgcatttttggcaggtgttgcaattttatggtcagtgggagtggcgggccgacatgtttggctacagcatttaccaccagatcaagtaccaagctgtggtccgggtttaaattacctcattgatgctttaccaatgaaaaccgttttacaagaagtactttctggctcaggtgagtgtgcggcaattgactggacttttttaggtcagtctttaccagtttggtcattggcctatttccttttactgttattggtttgtttatggcagttattccgtttttatccagtgtttaagacggctaaaaagtaagtttaaagtaattaaaaaaggctcaacttaagttgggctttttttataactttcgaataagtgaaaatataaaaaaattgatagaaataacgcataattttgtagacagatagttctgttttttataaagtgcagccgtttatatatccttatgattataaaaaaatgctttttaatatatttagtgtcttggaaaaaatagggctaaatgctcagaaacgtgctattcacgtacaattttctaatgaactactcaatcatcaagtattcttacaacgtatagaaggccaacatcagctaaatggtggcctaatggcagaattgatctgcctttcaaccaatgcccaaattgcattgaagcaatttattggtgttcaagtcgctgttgatcaggtcactgattcggggcaattgttccgaactacaggtattgtgactgaggccagttatggacaaagtgatggcgctttaacgctttataagctgactatagaagatgcgacaaatttatggcacaaacgccgtaatagtcgtgtttttatgaataaaagtatcgtagaaattaccgaagttctatttaaagaatggcaagaaaaaagtccactgtttgctgcgagtttaagtcttgatttgggtgggttaagtcaaaactatgatattcgtccgttcactatgcagcacaatgaggctgactatgactttctcacacgtttgtggcgaagtgagggggttagttggctcattgatgaatcagagctttttgtccctcattttactgcaccaatacaagctcaaaaactaagattaattgatgacaataaccaataccaagctttagcgcgtcgtagtattcgctatcacagaagtagcgcaaccgaatatcaagatagtattacaggctttgttgcagtgcgaagtctgcaaccgactgccgtacatgtacagcgttggcagcccgatgcgttagcgcaagaagagggtaatggttcagttgttactacccatacacactcagataactttgattcggccactttaagtcttgagcaagcatggcacgtaagccccgcctggatgcaagatttaaaaggggaagatcaggcaaccgcttcaagcagtagccaactagaaaaattaaatcagcacttcaccgacatgcatgcgagccgggccaaatactttaaagcctacagtagtgtgcgcgatacccaagtcggctattggtttaatttaagagagcaccctgaaattgatcagcatgaaggggcagatcaagagttcctaattattgctaaaaacttctataaccaaaataacttacctaaagatttacaacagcaagttagccagttattaacccaaagtcgttgggatcaacatgggtatgatgatattgagcgtcagggtaatgagctgacattaatacgtcgtcaaattaaaactgcccctgaatataatccagaacagcatcgaccaattgcctatccacaaagagcgaaagtcgtgggacctgagggagaaactattcatgtcgatgaatggggacgtattaaagtacgttttctatttactcgtagtgatgatcatggccatgacggtggtgcaggtagcaatgacaatgataccgactcggcttgggtggatgtactgactccttgggcaggagaaggttatggggcacgtttcttaccacgtattggtgaagtggttgtcattgacttctttgatggcaatatcgaccgtccatttgtgactgggcgcatccacgaagcacagcgttcgccaactaaattcgatgtaaaagggcagcttcctgatactaaaaagctaagtggcatacgcagtcaggaaatcaatggaagtggcttcaaccaattacgctttgatgacacaacagggcagatcagtactcaactccaaagtagccatgcggcaacacagttgaatttaggtaatttaagccatcctaaagaacaagcgacaagccaaggccgtggtgaaggctttgagcttagaacagacgcttggggagctgtgcgggcgggtaaaggcatgctcattagtacctatgcacaagagcaagcgattgcagaccatctagaggccgcacaagcacaatccttactttcacaaggttatgaaagcatgaaaatgctcagtgaagttgcagccaagcaacaaactgatgctttgaatgtaattaatcgcttacccaaattcatccagtctcttgagttaaaaaccacagggcaggcattaaatagtacggtaaacctattcaaagaaggaattaataacgatcctatccatgccctaaaagactgcggtggctttattcaagacattggtgcactagggggaaatgcaaaaggcgttgtagatgaatttaattctttctttagcgatgctaaagatgcggtagaaaatttaaaagcatttatcgaaaacgttgaagaacatggccctgatattgttaaaggaaaactcgcaagtattaaagaccgaattcataaaaatccatttgaaagtattcaagaggtcgggaaagtcttaacaaatgtcgagactaaagactttgatttgatgagtacgtgtggaacttttagtaaaggcagtaaattggaagtatcaccttctaaagcattgagttctttacaaggctttatggaaggttatacccaaggtttagaaagcagttccgatactcaacaacaagagcaaggcaaaatcttcagacaagcccttatgttgttagcatcgccaaatggtattgctttgacgacgcctgaaaatattattctacaagcttcgcaagatattgccgaaagtgccagcggttcaattaatttgagtgctcagaaaaatattattgggcatgcacaagacaaaattagtttgtttgctgcgcaaaagggtttgcgtgcttatgccgcgaaaggaaagctcgaactacaagcacaagatgatgctattgaagcaattgcgaagaaggtgattaagcttatttctactgaagataaaatcgagcttacgagtccaaaagaaattgtattaacggcaggtggttcacagctcaaaattaatgccaatggcgtattttcgacaacaggtggtaagtttgaaagtaaagctgggcagcatttgtttacggggggagccaaggtttcttatgaggttcctgagttaccaaaaaatggaccttatgctgttgattttttatttgctagtttagctggaaatggtatagaaaatgcaaaaatacagctgtatgaaccagacaaaaaagaaattatttgggagggtaaaacagatttaagaggaaaaagtaatttatctctccagaatgagtcaaaacgatatgaagctctgattggctttgatgattggtcaagtatatttgatgatgaagatgattatgaagaagaacatgaagaagaatttgaaataggtgagcatggtatgcaagctgaagaaaataacttagaagaataggtataatttatgtcaaaaatttatattgttaaatcaggtgatacactttggggaatttcaaaaaagcatcatatctcagtaaaagagttagctagaattaattcattatcaggtagaatgattcataatcttagaattgggcaaaagatttatttacaaaatgatgtaaataacactaataattttgaaacccaattaaaaattattttgatggacctttcttttaagcctatattaaaagctaccattcaattagagtttgatggaaaaaaaattattagaaatacaaaaaatagtatttttgaagatataaacattcaagatcattcgaaaggattaaaagtttttttaaaaacttaaatggtactttcgatttaattgccgatcataaagtgcttccattagggcggaaagtattaaaattaacatcaagaaaaatgaaagtagaaggttcacattatgcaaaagatggaatattaaatgaaacagttaatcagattatgagtaatttaaaaaaggttggaaaacctatagttgaaagcatatctactacatcgaataaagatgaattgaaaaataagcaaccaccactcaaaatacctgaagaaaaaatagagcaaaagcgtaccgataatggtaatagtacccatataattgctgcacaatttacagaagataactttttattaaagccagttaataataaatatcgagcttatattgtgaatgcagctaaaagacatggtttcacgccccactctttagcagctgttattgaagctgaagcagcaaaaataaaaaagacaggtgaatggaatactaatagtaaagcaaactcgagtactgcagcaggattgacccaattcttagatgaaacatggttagctatgtgtaaggataagagttcattagttgggcaatatgtaatgaataatcctaaactaactatacagcagaaattaaatttaagatttaatgcggaaatggctattgatgctgccgcagcctatgcaattagtaattttaaatcatctggtttgccctatcaaaaactaacagaaccaagttcaatcgctaagtttgcttatttgttacatcatgaaggagctacaggaggtaaaaattttgtactaaacactttaagtcaggaacgtgcaaaaaaattactttttactcaatttggaaagaatggcgctaagcaagctgcagattttttaaaccggtataaaggtgatgcaaaggctgcttatggagcatggctgagaaattatattgatgggcatataaatatttatcaatatgttgtagataagagcaagacttctggaataaacttaagtacggatgaaactataaagttattgaaaggacaaacaatttccactcctgctcctaaaatatcaactaccactaataatcaacaagtgacaaatgtcagtactattgaaaaatctgaatctaaaattagaattaatacttcccaagccccaacaaataatgttggaggagataataagtggcataaccctttagcagattgcaaattaagaacagcaggtttagcgaatgctaaaggtgcaacgtttggtaaagtaagaaataatggtactaagaatcaccagggtgttgatttacaagctaatccaggtacgaaaatatatgcagtctgcggtggtgttattgcatttgctggggcaactggtggtgcatatggtaaagtaattgtcttaaaagttgatataaacgatttacctgaaaagcaaaagaaatatgctcaaactaaacttacaaaaaataaatatgtctacttcttttatgctcatttatcagttattgatgtagataaaggtgatccagttgatactggcgaagtaattggaaaaactggtgcaacagggaatgctaataaaatgaccactatatccaaaggtgcccatcttcattttgaagccagaagcgctcccttattaggagtagggttagatggaagatttgacccaatcccatttataaatgcgaatttaccatattaattttgaggtacttatgaaagttttaaattcttttgcaataatgatagcttgtagtgtttcttttaatatttgttatgcaaaagaaaatagcgagtggaatgattatttacaagattctacccaaataaattcacctatagaatatatagattcttataataaatatacagttctaaatcctaatttaaaaattaaattagtggattttggtaatattaataaaattaaaaaagatattaaatattctttaaaaaaatatggagttcaaattttaaatcggaaagaggtatataatatttttgaaggtaaagttcctttaaaatctaatgttgactttacattgttatacaatgataaaaatattgtggcttttagaattcgggaaaatagtaatatagattatgtgaaagaaccatataaaaattttactgcaaatgcatatttttataatttgataaataataaatttattgaagtaccagttttgaattcagatagtgaggataaaagtaagtcgaccgatatcttacaaggagatcagttaacatatgattcaaaaaaaggacaatatatttatctagcaaatataaaatcttataaaacaggaaaaactcaatctataaaaactatttttaatagtaatttaaagtgtatttcatctactttaggatgtgagacaataggggttcttcctgctacaaaagctaattagtgtaaaaagcccaacataagttgggcttttttttacgtctctacaattccttctaaatcttcgagcgtatagttcggcatatcaataatatgggtttgaataccgtcttgtacataatcattcacatgaggatataaccagcgagtaatctgttcggcaacacttgagtgatactgaatttcaaagtgatttaagccataaaacaccgctttatgtgaatctggaactttaagctgaaaacgtggattaggatgttcacctagtgcgctttttacactcactaagtaatcgccaatcacggtaagcgctttattacgcaccttttcaaactcgagtgttcctgccactaaaaaggtattgatatgggaaggtagaggagccggagcacggttgtcatccatcataccaatacgggcatccatgtattcccagtcatcatctcgaacactaccatggcgtaggtctaaaatcccattactacggatattaaccaactgaccaattaggccaacaaatggaaaagcgcctagccgatcttgtaacgcaaatccaaaacgctcaagtactgcaccgtggtggggagatccaatacagacgaggttttcgaccatatgaatccattggtacatattttgtttaccgtaaaacagtgcgctacgggaaactagtccacccatactatgaccaattaaatcaatgctggtaattcttggattacgctgtactaaatcttctaataaatttgagaaactgcggccattggctgaaatacggcggcctgtattgtaatttaaatacagcatcgtgttgtgatcacgctgtgctaacagacgctcaccaatcccgccataatgcgcatttgaccaagtaagatggttcatgcacaaaccatgaaccaaaattacaatacggcctgcaagttcgccttgttggattgcaccgtagtggtcgtatagaaccattggcaaggcgaggggactgtgctgtttaagtagatagtctccgaaaataccatttaacactcctactaaaaaatgaagggttggtgttaatggcttctcatgaagggttggaaatttttcaataatacgacgtaaccctggtgctaaaaaacaactaccatatttttgtaaggcaccataagaaaactgatatgccttttggacagagggccgtttttggaaatttttagcattttgggcactaataccaaaagcattttttaatacttcaatattaatgacttgtattaattcatgtacaccatttaagctggtactgaacagttgagctaaaccttctagtacgtcggcctgactaggtggcgtacgatcccatttacaataagtttcatgtaacggtgttaagctcggcatatcttttccccatttacgttataaccgacgttttaagctgtactttttatgaacggcagctaacgtttccatcttagtagtttaaataacacatgtttttaaaatactgatgaatggtaagttgagtggtttttcttgtctgacaatagtgtttttatatacaaactgagaacaaaaatgtgagtttattctcaatttagagggaaaaatatatgaatattatctacctccatggctttaatagtagctcttcttcaattaaagggctcagccttaagcagtattgtagcgaattggacataaatgtgcatttgccagatttaaatagatctccggaacaggtagtagcacaggtttcagagctgattgagtctttacaagaggtggctttagtcggcagtagtcttggtggtttttttgcgacatattttgtcgcgaaatataatattccggctgtactgattaaccctgctatgcaaccatggaagctgtttgatgagttatttcaagttgaaaacatgccttataaggtgaacgatcaatggtcaattgatcatgttcagttacgacagttagaacaactggaactgaaacagcctgaaaatgctgacaaaatactcgtcttgttgcaacaaggcgacgaaattttggattatcgtcaagcacaacgctattatagtgctgcaacaccatcctcattgattttgacggatgctcatggcaatcgtgccatggaagattttgaagaaaaattacccttagtgatcgaattctttgcgcacaccatcaaataaggaaaacgtacaacgtgacacaatatacggctcaatcgcttgaagttctttccggtttagaccctgttcgtcgtcgtccggggatgtataccgatacttctcgtcctaaccatttagcccaagaagttattgataatgctgtcgatgaagccttagcaggtcatgccgacaaaatctgtgtcacggtttataaagatggttcgttgtcggttgaagataatggccgtggtatgccagtcgatattcaccctgaatatggccaaagtggtatcgaaatcattttaaccaagctgcatgctggcggtaagtttagtaccgataactatcagttttcaggtggtttacatggtgtggggatttcggttgtaaacgctttatctacacgtgttgaggtagaagttcagcgtcagggtaatttataccagatggcctttgagcaaggcgaacctgttgcacctttagcggtgttagaaggtaaagcacctaaacgtgcgacaggaactacggtacgtttctggcctgaagccaaatattttgatagcccaaaatttgctttaaaagcacttaaacataatttaaaagccaaagctgttttagctgctggtttaaaaatcacttatatcgatcaaattaatgatgaaaaaatcgaatggcaatttgaaaatggccttgtcgattatttgatggatgaattgcaagaccgcgaaattttgccaaaccctgcatttgtaagcagtgggcaagcagaccgtgcggcatgtgaatttgcgatttgctggaatgtagagggtggcgaacaggttcaagaaagttatgtcaacctgattccaactgcacaaggtggtactcatgtgaacggtttgcgttcgggggtgactgaagcgctacgtgaattctgtgagttacgtaatttattaccacgtaatcttaaactttcggctgaagatgtttgggatggcgtgaactatattttatcgcttaagttccaagaaccacagttctctggtcaaaccaaagagcgtctttcgagtcgtgaagctgccaatatagttttaaatattgctaaagatgcgtttgcgctctggctcaaccagcatgctgaaattgccatgcaacttgctgaaatggcaatttctaaagcagggcgccgtttaaaagctgcaaaaaaagttgagcgtaaaaagattgtttctggcccggctttaccgggtaagctggcggactgcgtgggccaaacacgggaagaaagtgaactctttattgtcgagggtgactcagcgggcggtagtgccaagcaggcgcgtgataagaactttcaggccatcatgccaattcgtggaaaaatcttaaatacatgggaagtttcttcagatgaagtacttgcttctcaggaagttcacgatattgccattgcaattggtgtagacccgggtagtgatgatttatctgaattacgttacggcaaaatctgtattttggccgatgccgactcggacggtttacacattgcgactttgctttgcgctttattcgttaaacattttccagcattggttgaagaagggcatttgtatgtagcaatgccaccattgttccgtatcgatattggtaaagatgttcattacgcgctagatgatgaagagcttgaaaccattttgaaaaatgttaaaggtaataagaacccgcaaattacccgattcaaagggttgggtgagatgaacgcaattcaactacgtgaaacaacaatggatccgaacacccgtcgtttggttcagcttgatctagatgatgcacatttaacggcaggtttactcgacaagctccttgcaaaaaaacgtgcagcagatcgtaagcagtggcttgagcagaagggtaacttagctgatatcactgtttaattaaagtgtgcaggataattttttataaaattatcctgcacctgacaactcatatactttattgaaaataattaatttatgagtaattttcttaattttaggcgatcctttatcttttgatagccatacttctaaaaaagctgtcttattctgttctttaaagaacaaatgttttcctttggcggttgtttatcccctctgctgctaaccatacacttcatataaatcatcgttatggtgttttagtcatctcagtttttccatgaatttatgtaattaatttgcaaaacgtattggaacaggatgaaagggaatttagtaatactttagctctctttacatctcatgtggtgactcatcgctaataggcccttgttccgaacttggctagatcgggtatagccaaagaatgattaaagcgtctgcacaccatctttaaatatgaaaaggaaaaagctatggatctccaactgaaaggtaaaacagctattgtaactgcggcaacagcaggcatcggtctagcaattgcgaaaactctggctaaagaaggaactgatgtcatcattacgggccggacccaagacaaattggcggcggcggtagccgagatagaagcaaatgctcccttgggcaaagtatgtggttttttagctgatcttagtacatcagagggagttgagacattaatttcacaacacccttacactgatattttagtaaataacttgggatattatgaagccaaaccatttactgagattacagacgaagactggtggcatatgcttaatgtgaatgttatgtcaggtgtacgcttatctcgtcactactttccaaaaatgttagaaaataattggggaagagtgatttttatgtcgagtgaggtaggagcattcactccaccagatatggtgcattatggcgtaagtaaatctgctctattggctgtatcacgtggaatggccgagttaacaaaaggcacaggagtgacggtgaacagtgtacttccttctgcaacacgttccgaaggtattatggactatttacgtcaaactgctcctcgtcccaacatgacagatcagcagattgaagcacatttttttgagatatatcgtccaagctcattgattgcaagaatgattgaagctgatgaaatcgcatctatggttgcgttgttagcaagtcccttgggatcagcatctaatggcgcagcagttcgtgttgaaggcggaaccttccgttccattctgtaatactcaaagcttaggttggcgtttgaagcgcacgactctgttcttacgcggccattggcattttgatcactaaattaaaatagacagatttgtctattttaatttagacagtaatttttatcggatggggaaattgaaaaatatcgcaatttgcaccgcctccaattcgatccactactgcaaaatcactcggcgcttcaaaggtaagcaaaggatgatgccaagtacctgcccgataattgatactttgcttgccatccgaaacaaaagcgcatagttttgaaatatcaggagtattttcgtctaaagcaggcgccacaacaattaaaaatttttgttgctgtaatggaatgaatgcttgagagcctttcggatggcgctctagcattgaaatttccataggtaacacactggccttaatatttcggaaaatactaattcctgcctttgcttcgccttcaatttcagtttcgacgagcgcatggtagcgctcggtgtgtgcatcattaatatgaaaaaaatcatgcccgtcacaacaaatgacttctccgaagggctgaaagttctcaatggttaaaggctgaatttgaatattcttcatgatcatgacttggcaatttttccccataaacggacacggctaataccaccatccggaatcatattaatacggatatgcgagactttttcatgctgtaaaatttcattcatatattcatgaatatggtccatttgcataggttgggcttcaagtaagtaagaccaaaacatactttgtggaatcagctgtgcatcggttgcattttcaaggtagaccgcctgaatagaaacttcagcaggaaagttacctttaaaatgcgccgtatcaatttcaattttttcaatttttccgcttttacctaatgcaagaatacaccagtcataacctggtgcacggcggcgtttggtttcccacccatcgcccatgttgacgccacggcctgggttaatcaaattacgtggatgtccaaagtgcgcatcgctataagcaattacacgaccgccattttctaaggccaataaatcgagagtctgctcgtggtcggtcacctgaatatgaacgtcaccataaacgcgtaaacgggcaacaccaccatctgggaaaatattgagtcgtatatgcgtgaaaattgcatcattattgaccataaaaatatgatgttgactcggccctagctcggtattttctaaaatactctgccactttgccccagtaaggtcaccatttggtgcataacatgcctctaatgaggcagaagcaggataatttcctgtaaaaaacgtggtgtcgatatcaagtgcactgatttttccactcacacctagtttcacaatacaccagtcatagcctgcatgacgcttacggcgggtctcccaaccgtccatccatttgccatgatcatcaaatttatcttcaacaaaaataggtgcttcaaattgcagcatacgctttgcttctgcaaagaaatcatctgaacactcaatcacttgtgcaccaattcgggcatctgccaaatttgttttagtattcaaaatttcagggagttcaaaagctggagcgtgcaatgttgccataatggagtatccgtatttcttgttaaaaacatgatttttcatttaaaactgcactcacactgagcgtgttgagatgagttttatacataaatatataagcatggtgcatgccagttttgtggaaaagctaaataaattttgaacgatggcatgtttttagcataagcaccctataggtgaatatctataggagcgtgttatgaatgtggtgattattggtgcgggaatgggaggtctaaccacaggcattgcattaaagaaatttggtcaccaagttcgtatttttgagcaaactgaaaagattcttccggtcggcgccgcaatttcactgtggtcgaatggggtgaaatgtctgaactatctgggattaaccgagaaaatcgccaaacttggtgggcaaatggatgacttggcctatgtagatggtttaactggagatgtgatgacacaattcagtttacgaccattaattgaagaagtaggacaacgcccttatccggttgcacgtgccgatttacaaaatatgttaatggatgagtttggtcgagatcagatttatttaggcaaaaaaatggtcagccttgaagataaaactgattttgtagaggttcattttgctgatggtagctcaacacaggctgatttactcataggggcagatggtacgcattcaatgactcgggcctatgtgttaggtcagcaggtacaacgtcgctatgcaggttatgtgaactggaatggtctggttgaaatatccgaagatttagcaccagctcagcaatggacgacttatgtaggagagggcaagcgcgcgtctctgatgccagttgcggatggacgtttttatttctttttagatgtacctttaccagcagggttagagaataatcgggatgaatataaaaaacttttaaaacaatattttgctaattggtgtcaaccagtgcagcagcttattgagcgcttagacccgcaaaaaaccaatcgggtagaaatccatgatattgaaccgttcacacagttttataaaggtcgtgtggtgattttaggtgatgctgcacatagcacgacacctgatattgggcaaggcggttgccaagctatggaagacgcgatttatttagcgcggtctttgcaaattaacactttgggactagaggatgctttacgccgctatcaaaacaagcgtaatgaacgtgccaatgaattggtgcttcgtgcgcgcaaacgctgtgacgtaacgcatatgaaagatgaaacggtcacgcaggcatggtatgcggaactacgccgtgaacaaggcggacatattatgcagggaattattagtaatattgtgggtaatccactcgattaaaaacaaaaacagcaaggagttttccttgctgttttatcttctaaataaaaattttagaagtggtatttaaccaatgcactgacgttattttcgtcggcacctttaataccaaatttgttattccacactgagtgctcgataccgaggtatagacgtgtatcaggagaaatgtgtttacctacattccatttccattgagttgtccagttcaactcactcgcatggtcatcttcagcggttgaccagtctaggaaaccatcaaccaagaaatcttcagatgcgattttaaatggaatgccataaacgaatgtcatttgataatcgtcgtcagttttttcattgttcgcacggtagaagtttaaattcgcatattggaaatatgggatatctaaatcaactgcaaaaccatacaagaagttgtcaaagttattgccgttttgagtattactttcccaagtggtactaatgagcacatctttaattgggccgtatgtcaattttttgccagaaacttcacctaagcttaaacgtggtgataactcaaagtaagtacttttatagtcatcttcgccacgcatacggtccataaagaaaaatacatcagcatatttaacttttgctgcatattccaaagtaatcgtagtttctttgtcatctacaacttcatagttttcaccataaagtccagtcacactaaaatcttgccagattggttttgcctgaaccatggcagttgcagataacaaggcacaagtcgccgcaagttgctttaattgcatttaaatgatctccccccaaataaagcacgctaaggatacagggtcttaagcaaaaatgaagccaaatttgatcaacggttaaaaaaaagcccaccgaagtggggcgctaaaaaactaactcattaatgtgtatttcgtgtgtttattgtttggcttaaatgaggggtacgcgagctgcgaaatgaaggtaagtgattaaataacaaattcaataagatagcaaagatacaagtcgaactaatacccgaatggaataaagtttgtacccaaactgggaaatgagcataaaattcatggttaataattggaatcatcccagctgataaagcagttgccacaataatcaaatttttctgatcgttataatcaatttttgccaaagtgcgaataccactcgctgtaaccgaaccaaataagaccaaacccgcaccaccaagtactggcataggaattgccgcaataaggcggcccataacaggtaatagacctaaaataatcagaatgactccgcctgctgccacgacaaagcggcttttgatacctgtaattgccaccagtccaacattttgggcaaaagcactttgcatgaatgaaccaaagataggagctatcgcacttgaaaacatatctgcacgtacgccgttggcgatacgttttgaatcgacttgggttcctacaatatctccgacagcaataatatcggctgtagtttccgtcataatcaccaaagtaacgattagcattgataaaattgcacttagctcgaaagttggtaaaccaaatgcaaataagtgtggaaattgcagccatgcgcctgagctcacctgactaaaatctccaaaacccataaagtaggcaagggtagtaccagcaacaatagccaacaaaattgataaacggcgaatacttgcttgtggcagtatatttagaataatcacaatgcctaaggtcagcaaagctaaagagatattctcgacgctaccccaatcaggtgctttgttgttaccacccatcatccagcgaatcgcaacgggtaacagagataacccaataatcgtgatgacacatcccgtcacaacaggtggaaaaaaacgaataatttttgagaagtaaggcgcaaggcatagtccaattaaagatgcggcaataaccgcgccgtagacagcaggtaaaccaccgcctgtagtgataatagcaaccatggttgccacaccagcaaaagacacaccttgcaccagaggtaattttgcccctagatatttggttccgatggtttgtatgagagttgccaacccgcctacaaatagggccgctgcaataagcattccgacttgtgctgcgcttaagccagctgccgttccaataatcagtggcggggctacaatgcccccatacatggtgagcacatgctgtaagccgtaagcaaaacttttggaaattcctaaatattcatgctctggagaaatcgcattcttttgctgatgattcatatttttctcctatttatatttgagttagctgccgcgataagtggaataagcaaacggactaataagtaatggaatgtggtaatgctgattggtgtcttctatgaaaaattgaatacaaacacgggggaaaaaagttttgatttgctgtgatgaaaaataaggggcaacttcaaattcaagttgataagcacctttacctaagttttttattccaaaatcactcactcgcccatcttggttggtaattgcagtcgctatcagttcatgagtggctgcatgaaacaacttcacttcgacctgtgccgccggtttacctaaattcgtatctaaaatatgagtgctgatcatgcttgtacttcctgagatagacgtaatagagcaattgcagcgagttgctcatgtacaattgttttttcaatagctaagttgttttggagacgttgatggagtttttttaaaatctcgtcgctactgaggcctgcggctttaattagaaaaataaaaccaaacttctgctcatactcgatattaccttgcagcagggcttgttgtgtttgttcatctaaggaaatgccagcttgttcttgggctgaaaaattttgctcttttgcattgagctgtttttttgcctgtctttcaccaatttttggatgggtggctaatgcggcctgaatctcttgccatgaccatgtgtggcttaattgttctgcataccctaaaagaactgaagttgatgagtagggacgttctgaaataattttttcggcccatacaggaatatggacgcagttgtttaacagagtcttgagttggtcgggtggggcttgattaaactcggctaaaaacactgttattcctaaactcgttgtcgtgatatagagttttagcaataacagtgccaagagtgatttgagatttgcttaagaatttggaaaattaataatcaattattgatttatgtgatttttataccaatattctgcaatatcctgacggcgacatacccaaacatgatcatgcatttcaatatagtctaggaatctttgtaatgctttaaaacgacccggacgccctaaaatacggcagtgcattccaatagacatcatttttggtgcagtttctccctcggcatacaacacatcaaaactatcttttaaatattgaaaaaactgttctgagctattaaatccacctggtgagcagaacttcatatcgttacattccaaagtataaggaataatcagatgaggtcgtgatgcacccgccgtatcggtaagtgtggtccaaaaaggcaggtcatcaccataataatcagagtcgtattgtatttgcgggaactctgcaagcaactgacgcgtattggggctatcacgcccggtgtaccaacctatggttttatttccaaacaagttttctaaaacagataaggcttgttccatatgctgtttttcgacttcaagatcactctcttgataatgaagccagcggtagccatgagaaaccacatcgtaatcggcttgtttaattgcctctacaatataagggttgcgaacaagtgccattgctactccgaaaatggtcatggggagcttgcgccgttgaaactcactatgaatgcgccaaaaaccagcacgtgaaccatattcgtacatagagtccatcgacatatgtttggctgggtaacttgcagcgccaataatctcggataaaaactgctctgaaccttcgtcgccgtgttcaatatgtttttcgccaccttcttcataattcagcacaaattgcacggcaaccttagcattattaggccatttcacctctggaggctgtccgtgataaccgattaaatcacgtgaataaggagacttttgaatctgctcaataagttctgctccagatagataagattcggacacaattgctctccttttgttcaatttttcataaaaatttaaaaaatcagcttgcatatttttatagatggactgatattgaaggtatgaagatcttcaaaataaattaaaagcagtacgtttaagtcaggagataacaaaccattacaccatcaaaatgtacaattgaagtcagttcatgcatgcttaaaacatgccaacataaaaaagttttgcatagaaaagatccacagtaagaaagagaggatggtatttatgaatattgaaatccgcacagataaaaacatccataatagtgaacgtttaattacttatgtacgtgcagaacttactcaagaattccaacgtcatagcgaacgtattacacatttctcggttcattttagtgatgaaaatggggacaaaggtggagacaaagatatccactgtatgatcgaagcacgtccttctggcttaaaaccagttgcagtgcaccataaagcaggaaatattgacgcttcaattcatggcgcgattgaaaagctaaaacgtagccttgaacatacctttgagaaaaaagaacacccgagaggtagtcaaccagaattcattgatgatgaagtttaaaaaacactaaaaagcccttcggggctttttttatgaatacgtaaaaagtccaataaaaactcttcacaactttaggtttgcaatgcaatagcgttgacctctaaaatcttcagtagagattaggcataatagcgctaatatatttttgagagatggtcatgttaaccacccaacagcaggctttaattaaagccatagaagaattagaactcgcgcaagtacaaaaattacttgctgagggtcttgatccgaatttcattgatccggaacaaggaccgccagtgtccattatttgtgatggaatttttaaatggtgggaagacgtctctgaagcgtatgaagcggggactccattatcacaagaagaaaaacagcaagccctgcaagtttatctcgatattcttgaagccctcattcaggcaaaggcaaatgttcatctttgggatgcagaagagttttatggtccactatgggatgcagcaagttcggcatgtgcaccagcagttcagcgcttgctagatgaaaaagttgatccaaacacacgtgatgaagaaggactcaccattttatcttcaatcagtcagttgttctttgattgtgattttgatgaaatagattggtcagaagcgcttcaagaagagcgtgaaacactagagttattgcgccgtcatggagcaaaaatgtcaaaagaattaactacttgattggataatagaatgagaacatttcaaattttaacttttgctctgaccgccgttgctgcaggaagtacttttgccgcagagttctcgtttgatcgtccgggttcaggctttggaacaggcattacaccagttggtaaattagcatgggaacaaggtttaccaagtgcaacttatacagagtcaactgttgatggcgttaaagaaaaaacagttactgtaaatgaggatatgttattccgtacaggtttagctgatggtttggaattgcaattaggctggcaaggtccggcatggactcaaactaaacgtgctggtaaaaaaacggataactcaggttttggcgatgtaagcatcggcttaaaaaaagcgattgatttaaatgatgaaaatttaacaatggctgtattggctgaagctgttattgcaacaggtaatgatgagtttactgcccatgacgatatatatagtttaagttcagcagtagcttataaatataatgatttgttggatacttctattaccatgcgttatgaagtacaaaacagtaactgggcagtgactgcaattccaactatcaattataagattgcgggcaaactctcaggatattctgaatttgtttatcgtaaagctgaaagccaagactaccaatatggtttaggaacaggtttagtttacgcagtaaataaccgcactcaacttgatgcaaatattggtgtggacttagaaggtcaagataagagctacaaaggtggcttaggcatggcattcttattctgatcagactaacttgaactcattattattgatgaaaaagcttatttctcagggaattatttattttctagtagccgctacttttgtattgagtcagtttgtctttgcagaagataagttattgtcacccgaacaggctttttcattttcggttgaatcgccacaatcgcataccgcaaagttatcgtggaagattcagccgaattattatttgtatcagcataaatttaccgtacaacagggcaatcagcctttaactttaaatttgcctaaagcagtttctcaatatgatgagaactatggccaaagccaagtttattaccatcaagtcaacttccagattaaaaccaagccttcagagcactacacagtaacttggcaaggctgtgccaaagaccgtatttgttatcctccacaaactattgagtttcaaactgacgcagatggtctggtcggtctgcaaaatcaggcaggtgcagcaccaaaacgcttattagatttggcaaatacacaagcatcaagctctacggagtctttagagaatcagagttcagctactcaagctgaaggagctgctccggagattgcccaagatcaggtttggtcagcaaagttaattgaacactcgctttggtatggtgttttattatttttaggtttaggcatgctgcttgcatttacgccatgctctttaccaatgctgccgattttaacctcgttgatcattcgagatcacaaaggtttaaaagcttggacgattgcacttacttttgtgtgtagtatggcattggtctatgcaggtctaggcttgattgcttcttcagcgggtttaaatttccaacgctggctacaacagcctgctacccttattgcgtttagtttgttgtttgtggtttttgcactaaatctgtttgggctttttgagcttcggttaccgcaaacttggttaaatcgacttgaccgtattcagtctatgcaacaaggtggcactttagtaggtgctggagtcatgggtgtggtttctgcgctcttggttggcccatgcatgactgcgcctttggctggaactttattatttatttctcaaacccagaaccaatggcaaggggctttgcttttattctgcctaggttttggcatgggaatccctttactcatcgcgagtgttttaggtgcaaagttcttacctaaagcgggcgactggatgcatcagattaaagtaatttttgcttttctgatgttagggttaagcctttatttcattcgccctttattgccagattggggcatgcaagtgcttagtttattgctagggctggcttttattatttatgcgctgtatcagttcttttggaaaaaagggcagttacagtggctttatgcgctcctacttttattggtaacgccatttgtggtttataaccagtatcaacatattcacaatcgtagcttacaaaattctgagcatatggctgagtggcatgtggcgaccacggcagcagactttcaaaagattttagtagcagctcctgctgatcgacctattgttgttgatgtctatgccgattggtgtgtggcttgtcagcctattgaacatcgtattttaaaagcatctgaggttcagacggctcttgcaccttactatctcattaaacttgatttgagccattatgaccaatcacatgaagctctactcaagcagtggaatattcttgggccacctacatatctctttttaaacaagcaacagcaagaaattcgttctttacgtttaacaggcgcatttagtcagcaagagcttttacaacaactggcaagcttatcaaaagttaaagattcaaattgatttgatctgaggtagttggtgaaaagtgcgtacttgattacgcccagaggcctttaccgcatagagggcttgatcggcttgtctaatcacgagataggggtcatttgcaaaagccgaactgctgatgccaaagctggcacttacatgaatttggatattttgattattgaagatagtcaattcttgtaaagcttgtcggcaacgttcggcaattttttctgcttgaataatatcggtatgaggaagtaataaaataaattcttctccaccaaaacgtccaataatatcttcattacgtaagttttcagaaagacactgagcaatttcaatcaaaacctgatcaccttggtgatgtccgtatatatcattaatttttttaaaatgatcgatatcaagaagtatcacggcataatcaaattgctgttcatgaagtgcttcaagatgggtgtttaagcttcgtctatttaagacattagttaatgggtcgatttggcttaaacgttgaatataggtttctcgttgacgccattgggtcagcaatatttcaaataaaataaaacacgccactaaaatgggcataataaaaaacagcatacttcctagccaaaatggattggtttgggcatgacgcatcgctgtaaaattaaataggggagcatatgaaataacccccgtcatacttaaatatgtacataccgctagaataatagttgcaggtataaaagcgctataaacaatttttctttcaaataaaaccaaacctacgccaatagtgcctacgtaacccaccattgtggcagggctgatacttccaattaaatatccatcgtggcacaacatcagcataaaggcttgtacactaattaaaggcacaattttttgcgcccaagcttggtctttgtagcgataacaaggaataatgagtacagctaataaaaataaggtcagtaaattcagccagatttgtgattcaactaaagatagatttgcccattgccaaatactaggagtaattaaaatatagcctttccataaaatccaactgaaattcattgcgcaggcgagggtaagcattaatgcgcttttttgtaatggggtccagttaataatgtgattgtgatggatgaaatcgagaatcacctgttttattttatttataggacgagtgattaaacgaattttcataataataaaggaactcctaaatagagatgtctcttcgtcagatcatcctaaagagggagagtttgaaggattcataacctaaacataccatgattcataaattaaacctcatgatttggattgtgaaaaataagaagaagtgacaaattttaaatttgtcacttcttcattttgattacgtcttatcaagttcatgagcaaactcagcaatatccgccatcgcctgttttgcttcttcgaaccaagcattaaacatttggaagttatgccacatgcctgtgtaaagtttaaagtgtactttgacacctgcttcttcagctttctctctaaaacgtttggcatcgtctaataaaatttcttttgaaccgacctgaactaatgttggcggtaaaccttctaagttatcgaaaataggtgaaacacgcgggtcatctgccgcaatatgattgccaatataatgttgaataccgatctgaagagcttcaagagaaagtagggcatcatgtttttggttaaatcttaaagactcactggttagggttaaatctagaaaaggtgacaataaaatcaggccacttggcataagttcgggttgttcttttaaacgtaagcaaagtgccaaagccaaattagctccacaagagtcaccagataaaataatatctttaggctggataccttgaactaataatgattgatagacgtcatataaggcctcagttgcctcaggatatggatgctcgggtgcaagtggatagtccacatgaataatttgcatttgggtacgagcagccaaatctgtcatgaacgcatgatgtgtttttaaacttcctaaaaaaaaggcgccgccgtgaatatgaaaaataagctgggtcgctgaatcttgagctttaatttcctcacccttaatgccagcaagtcggattggtcgaacagttacatttttttgttttggaaatgctcggcaaagttgttcaagcatagggcgcagagcagttgggggtaaattcaactgacttggtttgcgaattgctgttttaagaaatgtttctgtgaaataatattttaaaacattaggtatattcatatagtatccgcttatgttaattacttgtttccctataaattttatttttcaaggttacaaggttacacgaaacagtcacattcaaaaattgcaatatcgttgcgagttttgaatactgaagtcttggaagacccaaggatattacaaaaatgaaaaagattgctttagctttaggacttgttggtatggctgcatttgccaatgcggctgacccactaaacggaacggtatggaaaacgattgatgaccaaaccaataagcccaaagccgtagtaaagtttacggaacagaaggatggaaccttaactgcaaccattcaaaacattttgacaccaggtgaagaaaacgcttgtacaaaatgtgaaggtccgtataaaaacaaaccgcttaaaggtgtgaccattgtacataatctaaaaaatgtaggtggtaacagttatgaaaacggtacaattttagacccgaaatctggcaaaacttacaaattaaaaggtgagttggctgagggcggtaagaagcttaaattacgtggttatattggcgtttcagcattgggccgtaaccaaacttggattcgtgcgaactaaaagcttaaataaaaaacgagccattgggctcgtttttttatgcgcttaagttttgataggccgtttcgtcaaagcctaccagaaaccctttagaggtctgtagaactggtcgcttgattaagcttggctgagcaattagcgcctcaataagatgatcttcactgcttaaagcacgcgtttgttctttttcagatagttttttccacgtagtacctttcttgttgagcaccgtatcttgtccaatttcttttagccagatttttagagtatcagcatcgatcccttgttttttataatcgtgaaattcgtagctcaaaccttttgcttgtaaagcatcaaatgcttttttcatcgagttacagtttttaataccataaatttttaacattttatcggaccatgtcaaaaagaaagaacacacagcctaacccaaaatgcatttgagcactactttatacagatacttttaaaacaaatgaaaaataatgattaaaacaataaagaatgtcatgttattgtcataagacaaggtaataatgagcttaataagaataaattaaaaactaaaagaacgtagcgcaaaaaataagagatagaaaagagaaaacccgcatttaatcatcctgatcatgcgggtctcatttcaacgtccattgtcacatccttgcaaataaacttatcttaagtttattttatcttcctacggcgtcctatccttttgcgtcatcctgactgcttccctgtgccgtggggctataatgccgttaaacatgtgtaagaaaaatactcaaaagcgacatgtgttgtaagcaaaaacgacaatgtaagtgaacatgtgttcacttattcttgaattttatagtcgataataactggagcatggtcactaaaccattgatctttatagacccatgcatttacagtgcgcgctttccagtctggtgaacatgcgtgatagtcaatacgccaacctacatttttcgcacgcgcttgtccgcgatttgaccaccatgaatacaattctgcttctgttcttacaacacggaaagtatcgacataaccaagttcatcataaatgtggtcaagccaagcacgctcatgtggtaaacagccagacgacttttggttgccagaccagtttttaatatcaatccgtttatgaacaatgttgtaatcgccacaaataatgatggacttattctcatcacgccattgtttcaagattttggcgtattcacctaaaaataaatctttacgtgcttgcgcttcttcaccacttgagcctgaaggtaagtataatgatgcaatatgtacgggatgtgacaaacctaaatcgaattcggcagaaatgaagcggccttgactatcggccaattcaaaccctaaaccatctttaatagagacaaagggtaagcggctataaattgcagtacctgcgtagcctgcacgctctgctggaaagagatgggtatgccatccctcgggtctaaatttctcagtccattgttcatgggtaatgcggctttcctgcatgcatacgacatcggcatctgattgttctaaccattcaagtaagcctttcgtcactgaagaacgtaagccatttacgttaatggaaacgactcgaagaatttttacatcacttggatactgatcctttggtatcatgcgaaaatttaacctcaattgtgaatttggagcacctcatgacaacgcctgtgtcatttcacccgcaagcatttatcgaactcgcattatcacgcggtgtgcttaaatttggtgagtttactttaaaatctggacgcgtgagtccttatttttttaatgcaggcctactcaacgatggtgaagctttatctcttttagcacaaggctatgccgataaattaacacaatgtgaaaatgttgatgtgatttttggaccagcttacaaaggtattccatttgtagctgcgactgctgttgctttatcgcaaacacataacaagagcgtgccatggggctttaaccgtaaagaagcaaaagatcatggtgaaggcggtgttttagtcggtgctgcggttgaaggtaaaaaagtctggatcattgatgacgtgattaccgcaggcacagcgattcgcgaagtggtaacgattttgaaaaatgccggtgcaactattgcgggtgtgttggttgcgctagatcgtcaagaacgtgggcaaggtgaactttctgcaattcaagaagttcaaaaagaattagaaattcctgtgcatgcactgattaccatgaaagatttaatggattatttagaagcgaaaggcgaaaaagaagcgctagcaaacatgcaagcttaccgtgaaaaatacggtatctaaaaacaaaaaggcatacctctaaaatagggtatgcctttttaatatttacttaaaactgataattcaaacgtaataacacattacgtggtgtgcctggcatgctgtccgaacgccagtactctttattggttaggttatttaccgcaagtgtgacattccaagggtcggcactgtagccaattgctgcatcgacacgattgaagccttccatttttacttgattattaatatttgaataataagacccgacataggtcacgcccacttcggtataccactgttcagttggtaaatagcgaacaaataaattacccgtatttttagaagtgttggctaaataattgccttctcgctcagggttttgattgtcttctttaactttggcatcggtatagccatacccaccgcgaacaaagacattatcaagtacacggccaataaaactaaattcgagaccacgagattgatgttgaccagcagttgcccaaacctctggttcactgtcagggttcggtttatagcgaatattatttttacgaatatcaaagacagaaaattgagtatttaaacgattatcgaaccattcactttttaccccaacttcatattgctcgttatattgaggctctttatccattttcgcgacatcggtacttccagtaacttggttaacacccatttgtccaccaaacggtgcgaagcttttagagtaagacgtataaaagctatgttcaggaactggttgccataccaagccaacatttgggctaaaagtactgtcttttacattacgatgttcattcttaattttgttagtagttgaaaagtcgaagtaatcgtagcggagtcccatcataagtttaagttggtcatttagaccaattaaatcttgaataaatacgccgtaagttgtgccttcattatagttatgctgactaatctttaatgggccattgccacgactgtactctcgttcaccagtgattggattaacgtaaccataaatagctgatccattttgagttttattggctagacgtggctctcgttgttcataagtccagtctgtaccaaccataatttggtgttcaagttggcctgtcttgaacttgcccttaatatcaaatgtattggtggtggtcttattgctggtttgttgccagtagtaaatttgatcgatgtaacctttttttgtacacgcctcattctttgagttttttccatctaaaccacaataattgccaaaataaaagtggtcaaagttctgttctgcttgtcggtaacttgccgcccagtggaagttccaatcaggcgcatattcataattcacatcggtacgaacgacttgcaaaatatcatcaacataatcaccgtcttgggcaaatcccattttaatagaagttcccgcaggcaagttgtcacgtgttggtccacggtcaggtacacgatttaatttgtcataggtatattgtgtggtccaggtcagctttccatcgtcattcttataggtaaagcttggggaaaacatctcaatcttattttcaataccagagcggaagctgcctgcctcgccatattctccagtcaaacgcactgctaaattgtcattaagtacttggttgatgtcagcggttgttccgtagttatcgtatgaacccgcatatgcgccaactgaacttttagagtcaaaattggcgaatttactcaccatatttacaaccccgccgccagcactacggccatataaaaccgaagcagggccttttaaaatttctatacgttcgatattggctgtactgcggcgtacttgtccgctttcacgtatgccatcacggtaaatatcacctgtatcagcaccaaaaccacgaatcgtgatcccatcaccacgcatatcgtaactggttgatacccctggtgtaccttgcagcatgacgcttaagtcattcgatccataaattttatatttctgaacatcaatggtatcaacggtttgagggatatcttttttatctaaaccattacgagtgacattggctttgtcataatcgatatagcttttaatcgggtcgagctcactcatggcctcgatttttatggttggcatggtggctgcggcttttgatgagaattcaatcaattcctcggcgttagcaccttgaatatttaaaatcattaaactgagtaagctgagcgggaatgaacccttaatttggggagatgatatagaaattcttaacataaaaataaaatcaattaacaaaaataaaagtataaatgataattataatcatttaattgtttagaataaaagaactattaacttaaaaaatggcatatttattttttattaactgatttttaggaagttaattagcgaattaaaggacttattgagttgactcattagtttttcttgttaattaggttttagagggggctttttattgataaaaatgccccctctaaaatcacgcattatttttgagaacatctaaaatatccatttctggatcataatttttgtcaattgttttgcaaatcgcttggcctacaatgacttgagagccattaaaagtcatagtaggtgcttcatagagctcccaaccatgattaagtgctttagtcactcgtgcacaaaaagcagagtcatcaggtccggttaaatagcgataaagtttcatctttagcctttaaaaataatattttatgggagtagtttaactgaatttaccttaattcaagataaagaaataaccgataaggttttactaaaattaagaaaaacgagtgaaaaatctcagctatactcatgctaatttaaattttaagaagagcttgagcatgcgtgtacttgtcgtcatggatccgattgaaaccgtaaatctgaaaaaggattcaaccatggcaatgttgtgggcggcgagccgtcgtggacatgagttaggctatgcattacaacaagatttatatatcgatcaaggtaaggcttacggtctcatctctccgttaaaagttttcgaagattacaaccattattatgagttaggcgaaaagaaaaaagaatctatcgcggcttatgatgttgtactcatgcgtaaagatccgccttttgacatgaactttgtctacacaacttacgtgcttgaacaagctgagcgtgaaggttcatggattattaataagccccaatcactgcgtgactgcaatgaaaaattgtttgctacgcaatttcctgaattacaggtgccaacacttgtaacatcgcagcagagcttgattcgcgaatttattaccgagcacggtgatgtgatcgttaagccacttgatggtatgggtggtatgggtattttccgtttatatcaagatggtgtaaatattggttctaccttagaaatgcttacggaattaggcacccgcccaattatggctcagcgttatattcctgaaattgtagaaggggataaacgaattttaatggtaaatggcgagcctattccttactgtttggcacgtattccgcaaaatggtgaagtgcgcggaaatttggcagctggtggcttaggtcaagcgcgtccactcacagaaaatgacaaactcattgctgctaaagttggtcctttcttacgtgaaaaaggtttggtatttgtaggtcttgatgtaattggaaattatgtcactgaaattaatgtgacaagtccaacctgtattcgtgaaattgatgcgcaatttggtacatcaattgccgatgacctatttgatgtattagaagctggtcgtccagcataagggtctatttcgggtggtttcctaagcttattattggaaatcacccgaaaatatatgaattaataaaatcacaatatgaaatacgctagcgctttgtaggcatattttcaaaaaagcacatctttctgttataaacgagtgaaattcgcttttcgttaatgaagctttaggattaaaataaacggctacaaaaatagatgacaatttccattgttttttgagttgaagaattagaccgtgaccgattcacagcaaagcaaacctaaacatgtcatgatgatggctgccggtactggtggacatgtttttccagccctcgccgtagccaaacaacttcaacaacaaggttgtcaagtttcatggttagccacgccaacaggtatggaaaatcgtttattaaaagatcaaaatattccaatttatcaaattgatattcaaggtgtgcgtggaaacggagtgatccgtaaacttgctgcaccttttaaaattttaaaagcaacttttagtgcaatgcgctatatgaaacagcttaaagtggatgctgttgcaggctttgggggatatgtggcaggcccgggtgggctagcagcgcgtttattaggtattcctgttctcatccatgagcaaaatgcggttgcaggatttaccaatgcacagttatcccgtgttgctaaagtggtatgtgaagcgtttccaaatacatttcctgctagcgaaaaagtagtgacaactggcaatccggtacgtcgtgaaatcactgatatcttaagtccaaagtggcgctatgatgaacgcgagcaagcgggtaagccgttaaatattttaattgtgggcggctctttaggtgcaaaagcactgaatgaacgcttacctccggcattaaaacaacttgaagttccactgaatattttccatcaatgtggtcagcaacaggttgaagcaactcaagctttatacgcagacgcaccagcaaatttgaccgtacaggttttgccgtttattgaagatatggcgaaagcttatagcgaagcagacctgattatttgccgtgctggtgctttaactgtgacagaagtagcaacagctggtgttgcagcagtttttgtaccgcttcctattgcggtggatgaccaccaaactgcaaatgccaaatttctggccgatgtcggtgctgcaaaaatttgccagcaatcgactatgacaccagaagttttaaatcaattgtttactacgctgatgaatcgccaattacttacagaaatggcagtgaaagcgcgtcaacatgcccaaccaaatgcaactcagcatgtggttgatcttatccaaaaaatgtaatcggatttactatgtctccaacaacagctgcgaaccaagcaaaaaaactgattaaagtgcctgaaatgcgccgtatcaaacacattcattttgtgggaattggcggtgcaggtatgtgtggtattgctgaggtgttagctaaccaaggatataaaatttccggttcagatattaaggcatcaaaaaccacacaacaattagaagaaaatggcattaaggtctatatcggacacgaagcagaaaatattaaaaatgcaaatgtgcttgtcgtgtcaacagcaattgacccggaaaatccggaagttaaagctgccattgaacaacgtgttccgattgtacgtcgtgcagaaatgctcggtgaacttatgcgttaccgtcatggtattgctgtggcaggtacacatggtaaaactacaaccacaagtcttttgacgacaatgttggcggaagaaaacctcgacccaacttacgtgatcggtggtttacttaacagtacaggtgtaaatgcagcgcttggtgaaagccgctttattgttgctgaagctgacgaatcggacgcatctttcctttatttacaaccaatggcagcgattgtaaccaatatcgatgctgaccatatggacacttatgaaggcagtttcgataaattaaaagataccttcgtacagttccttcataacttaccattctacggcttggctgtggtttgtggcgatgatgcgaacatccgtgagattttgccacgtgtaggccgtccggttattacttatggttttaatgaagataatgacatccgtgctatcgatgtagagcaagatggtatgcgttcgcactttactgtattacgtaaaggacgtgagccgttacgtctaaccattaatcaaccgggtttacataacgttttaaatgctttggctgcaattggtgttgcaactgatgaaggcgtttcggatgaagcaattagccgtgcattaaaaggttttagtggtgttggacgtcgcttccaagtacaaggtgaatttgagcttggtgaagggaatgtaaaattagtcgatgactatggacaccatcctaaagaagtagaagctacgattaaagctgctcgtcagagccatcctgatcgtcgtttagttatgcttttccaaccacaccgttactctcgtacacgtgattgttttgatgactttattgaagttttatctcaagtcgatcaattattattactagaagtttatccggctggggaaaaaccaattgttggcgcagatagccgtactttggcgcgtagtattcgcttgcgtggtcaggttgaaccgattttgattgatccggttgaaggtaatttgcaaaacatcatgcaaagtgtgttacaaccaaatgacttgttattaacgcaaggtgcaggtaacgtgggagcaatttcagtagaacttgcacagcaccatttgtatgtgaaataaacaaaaagtattgaattatcgggttaaggatttaaacgtgtcaaatgctacaaaattcggcaaagttgccgtgttacttggtgggaaatcggctgagcgtgctgtgtctttagatagtggtcaggcagttttggacgctttgttacgttcaggtgttcaggctgaggcatttgatccgcaagaccgtagcgtaactgaacttgtaaactatgaccgtgcatttattgtattgcatggtcgtggtggcgaagacggtcaaatccaaggtgtgcttgagtggttgaacatcccttatacaggaacgggtgtacaaggttctgccattggtatggataaagtcaaaaccaagcaaatctggcaaggaagtgatttaccaactgcaccgtatcgcattattactaaagaaactgacttggattcagtgattgctgaattagggttgcctgtcattatcaagcctgtacatgaaggttcaagtgtaggcatgagtaaagttgagaaagctgaagattttgcggcagcaattgaaaaggcaactcagcatgatgctgtagttatggcagaaaaatggattacaggacgcgaatttacgatttcattcttaaatggtcagcctttaccagttattcgtttgcagccaccagcagatgttgctttctatgactacgaagcaaaatatcaacgtaatgatgttgagtatggcattccttgtggtcttagcgaaactgaagagaaaaaactacaagctctatgtttacgcgctttccaggccgtaggtgcagaaggctggggacgtattgatgcaatgcaggatgagcaaggtaacttctggcttttagaagtaaatactgtgccaggcatgaccagtcattcgcttgtcccaaaggctgctaaagcagtaggttatagctttgatgaattgtgtgttgcaattcttgagcaaacattggaaggtacggcttaaatatggcacaacttccggcatccatgcgccgtaaacgtgcggcaattacttccattcatgaaaaaccgcctacgcgcaagcaaaaacttgccaatgccggcggatgggtgttgctggttattgcctttttagtcttggcggtcggaatttacggactatataaagttattactgatgcaactgttgcaaaacttgaagttgtaggttcaacaactccagttgagactcagcaagtgatgcgatatgtgcagccgattgtaaaagataactactttacatctgatttagagcagattcgtgataaagcattagaaatttcatgggtagaccgagtcgtcgtatctcgtgcttggcccaatggtattcgcgttcgtgttatgcctcgacatgctatcgcccgttggggaacaggtcgcttattgagcgatggtggcgatgtatttagtgaagcagagccgagacttcatcctgagcttccgttactacacggtccggtaagtcagtctaaaatgatgatgcgacgctataatgaaattaatcagttattccatcctgttaatttgcgtttaaaagagttatatctaacagagcgaatgacttggtttatgcagtttgactctggtttacgaattattgttgaccaagatcaaacaatgaataaattgcaacgtttaagtcatttggcacaatctgacctaaaacctgtgtggacaaaaatctcagccattgatttgcgatatcgtaatggattatctattcaatggaagaatgcaaccccacctaaaatcgtgaatggtcagtttgttgtaacgagtgatgacacaagcattgcaggtggtacaaaagcaaagccataatacgtggctttaaaataggcaatttgcctggtattagacaacaaagaaatggtatgagtgatgagtgaagctgttccctcagttgttgcgattgacattgggacgcataaagtttcagttttgattggaaaaattcatgcgccggataacattcaggttatcggtatggcaactgctcgcaatcgaggcatgaacaaaggaaaaattgtaagtctcgataaagtcattgctgcgattaaaaacgctgttgctgaagcggaaaatatggccgaatgtcgcattcatagtgcgtgggtatctattccaagtaccgagctacaaagtttctatgcttctggacgcacacctgttgctaacccggcacatgtgattacaaccaatgaagttgtacgtgcattagagttggcaaaagcaagccatgtgacttctgactattatctagcgagtgcagtcccattaggatttgaattaggcgactcatctgaatgggttcaaaacccaatcaatatgaccgctcacagcatgactggtcattatcagcttatgatgatgccgattgccactatgcaaaaccttgatcgtgccatgaaaggcgcgaacattggagttgagaaaatggtagtttcttgcttggctacggctgaggcaagtttgcttaaagatgaaaaagaatatggtgtctgtcttgtcgatattggtgcaggtattaccaatctggcagtttatttagatggccgtttggctttagcacgcaccttacagcgtggaggtgagcatgtgacacgtgatattgctgccgtgttacaaacaaccactgaagaagctgaacgtattaagattctgcatggctgtgttgatctaagtgctgttaagcctgaccatatgattcaagtacagggtattgatggtccgcaaacgattagccgaattgagttagcggaaattattattgctcgttatgaagagattttcagccagattcgcgaagaactcgaacaaagcggtgcaatccatggtctatatcatggtgttgtattgactggtgatgcttgccagattgaaggtatggtaagtttggcgcgtcgtatgttaggtgtgtctgcccatctaggtaatccgccattacaggtgtatgctgatgatcagcatcaagctgcattacgccgctcaatgtatgcaacagcagctggtttacttatgtttagccaaagtgaattacaagaagctgttgaggagcctgaagagggaaatgaccgttcggtatgggaacgaatggtgaatggctggaatgcttttaatagcaaacttaaagccattttttaggatgtatgtatttattggtagaattgttaggaagttgtaagagaaaaccactgtacttgacaaggttggtattgcacagcattcttaaaattagttatttttgaaaatcaaggcagtatacgggctgaagtgactgccataatgtattaggaaccctaaaggtcatggcctcatttgaatttatagaagatgaactaaacgatggcaacggtcaagcccgtttcactgtatttggtgtaggtggcggtggcggtaatgccgttcagcacatggtacagtctgatattcagggtgttaaattcgtttgtgctaatacagataaacaagcacttgactgtatgaatgcccctttcaaaattcagttaggtgagcaaagtacacgcggtctaggtgcaggtgctaaccctgaagtaggccaggtagcagcagaagaaagccgtgaaattattcgtcagcaccttgaagggactgacatggtgtttgtaaccgctggtatgggtggtggtacaggtactggtgcagctccggttgttgccgaagttgctaaagaaatggggattttgactgttggtgttgtaacaactccatttaactttgaaggccgtcgtcgtcaaaagtctgctgagcgtggtattgaagcgctggaagctcatgttgattcattgattattattcctaaccaacgtttattaagcgtttatggtgatatttcaatgaaagatgcctataaaaaggcagatgacgtattgttaaacgctgtacgcagtatttttgaccttgtagttaaccgtggtcatattaaccttgacttcgcggacttgaaaactgcaatgagtactcgtggttacgcaatgatgggtgctggtttgggccgtggtgaagaccgtgcgcgtcaagcagctgaacaagctatccgtagcccattgcttgataatgtaaacattattaatgcgaaaggcgtgttaattaacattactggtggcgatgacatcacattacgtgaaacagaaatcattactgacgttgttaaccagattgttgacctcgatgaaggtgaaatcttctacggtacagtatttgacccagatgcacgtgatgaattacgcgtaactgtgattgcaactggtttaacacgtaatgcagctgatgcagagccaagaaagcgtaatacagttagccatacatcaactcaatctgcacaatctgtagatgaagatgacgttcctgcaattaataaacgccaaaatgctgaaaatgacgtgaataatgcgccaagttcaacaccgcgttcttcgccaatgagtattcaagattacttgaaaaatcagcaacgtaagtaatttagcgtacaatctattgaaaggcagtgtataaacactgcctttttttatttttgatcaatgactaaatatgctaacgtatagcggttttaaaaaagaagttacaaagcatggtgaaacagcgtactctcaatcgtgtggtaaaagcgagtggaataggtcttcatagcggtcaaaaagtgatgatcaatttcattccacataccgtggatggaggtattgtatttcgccgtatcgatttggatccacctgtcgatattcctgctaatgcattgctgattcaagaagcatttatgtgttcaaatcttgttactggcgatattaaagtcgggacaatcgaacatgtgatgagtgcgattgcaggtttaggaatcgataacttaattgtggaagtgtctgcttctgaagttccaattatggatggtagtgctggtccatttatttatttgctcatgcaaggtggcctgcgtgaacaagatgctcctaagaaatttataaaaatattaaagccagttgaggctttaattgatgataaaaaagcaatattcagcccgcataatggctttcagcttaactttacgattgattttgatcatcctgcatttgccaaagagtatcagtctgcaaccatcgatttttctactgaaacgtttgtgtatgaggtcagtgaggcacgaacttttggttttatgaaagacttggattatctcaaagcaaataatttagctttaggagcaagtctagataatgcaattggcgtagatgatacgggtgtggtgaacgaagaaggtttacgatttgccgatgagtttgttcgtcacaaaattttagatgcagttggtgatttgtatttacttggtcatcaaattattgccaagtttgatggctataaatcaggacatgccttaaataatcaactattacgcaatgttcaaagcgatccgagtaattatgaaattgtaacatttgatgacgagaaagactgtccaattccatacgtgagtgtgacataagtcattgtctttatttggctatgttataatgtaacattagtaagtgtgatttttatcacatattaagaacgattctaattaagaaatagaaagctcatcattttttattgcttgccaaacgtagtaaagcttggctaagcttagggtcgctcacgaagtcggcggcactacgtaacatttcttgtgtttccggggggatggatttagaaggctcagatgaggtcgttacaggaatagttttatttcttaagcgaacttgaattctttgtaagtcttttaatccttcaagttgagataatttagatacatattggctctgtaaatagctgagttgactaatcattgcctgattttcaccagtaataattaaagagccattttgataacacacgacttgccattgttccggttggggcaataagggttggattattttcgtaagtctttgccattgcgcgacttgcgttgttagaaacgtaaggtttcctgtttttatgtgttttccggtttgttgaaaaacgttatcgggtttagacattgatcattctcaaatggtttcttgtcctaatcttaagcgttcatttcaaccgatatcaaggaagagatcataaggaacttgagtaagaacagtttcaagaggtttttatgcacacgcgtcgtattttattagcgttttcacttgccgcttcggcagcatcggttgcttttgcagattatcaaaatattaaccaatctactgattcagatcgattggaacagttatcaaaaacactatctcaaggctcatatactcatcctgatgatttagatcttccggcgagtgcaaaagtttcagtgactttacgtgagaaaacagttgaactcaacaatgattcactggcaaagaaatacggcactacgacagctaaaaactcatttaaaacctcttcttcaaatccttattcttggttagtttctcatcctcttcctgatacagtacgtgtttcttctaactttggtggtcgtaccatgggtggtcgtgcagagcatcacggtggtttagatatggctgcaccaagtggtacaccaatctatgcgactggcccgggtattgtgactaaatcaggctggggcacaggttatggccaatatgttgaaattaaccatggtaatggttatttaacacgttacgcacatgcttcacgcttaatggttcgagtaggtgatcaggtttctgctggtgaccatattgctaatgttggttgtacaggccgctgtactggtccacatttacattatgaagtagttaaagatggtcaacgtaagaatccatcaacttacttagcaatgttgccttaattacattgcctccaaggtcaaggttattaaatttatgaatttgaaattaacttaaaccttttttaacgtaatgattgtataaaaaaacgcctttattggcgtttttttgttattttgtttactgctcggtcaatgactattcattcagaaaataataggccccccccacattcacccgtggcaataacttgaaaggggtaaaacgtggtaaaaatacaaagtagattagagaacaaggaacaggtgaattatggcgttttacggtgactccgacgcacaagaaacccaagaatggcaagatgcattcgattcagttttacaacacatgggaactgagcgagcggcattcttgttggaaaaactttaccaacaagcaattgctaagcatgttccaattcaacgtctcaatacaccttacttaaatacaatttctgttgaagagcaacctgcaatgccaggcgaccaagatatggaacgccgtattcgtgcattgattcgttggaatgccttagcaatggtacttcgcgcgaataaaacaggtgatgatttaggtggtcacttggcgagcttcgcatcaagtgcaacattatatgacgtaggttttaaccatttcttccgcgctaacagtgataactttggcggagatatgatttattaccaaggacactgtgctcctggtatttatgcacgttcattccttgaaggacgtttaactgaagaacagttaagtaatttccgccgtgaagttggcggtaacggtttaccaagctatccacatccatatttaatgccagactattggcaattcccaactgtatcaatgggtcttggtccaatcatgtcgatttatcaagcgcacattcaaaaatatttgatgaaccgtggcttgatcaaagaagaagatcgtaaagtttgggcatatctcggcgatggtgagatggatgagccagaaagcttaggcgcgatctcacttgctggtcgtgagaagcttgataacttaatttgggtagttaactgtaacttacagcgtctagatggtcctgtacgtggtaacggtaaaattattcaagaacttgaatcaatcttccgtggcgcaggctggcgtgtcattaaagtagtatgggggcgtcattgggatccattattagctaaagacacaagtggcgcattaaaagcacgtatggaagaagctgttgatggcgactatcagcgctatcaggtaaaaggcggcgcatatacacgcgaaaaattctttggtaagtaccctgaagctgcggaacttgtaaaagatttaagcgatgaagatatcgataatcttaaccgtggtggtcatgacccttacaaagtttttgctgcatatgcagaagcgatgaaagcaaaaggtcaaccaacagtaatcttggcgaaaactattaaaggttacggtttatctgaagaaattgaagcggtgaataaaactcaccaaatcaaaaagatgcaaatcgactctttaagatatgtacgtgaccgtttcaatcttccattcacagatgagcaattagaagagcttccattctatcgcccaagtgaaaactctccagaaatgaaatatatgaaagcgcgtcgtgaagcgttaggtggttacttacctgcacgtcgtcgtgagagtgaatctttagcgattcctgatttatctgtatttgatgcagtgttgaaaggttcgggtggcaaagagcaatcaaccactatggtgatggttcgtttaattgctgctttacttaaagaaaaagcaattaaagaccgcgtagtgccaatcgttccagatgaagcacgtacttttggtttagagggtatgttccgtcagcttggtatttatgccgctcacggtcaaaaatatacaccggaagaccaagagcagttaatgcattaccgtgaagcaaaagacggtcacatgttacaagaagggattaacgaagcaggtgcgatgagtgcatgggctgcgttagcgacaagttattcaaccaataacttgccaatgattccaatgtacatgtactactcaatgtttggtttccaacgtattggtgatattgcatgggctgcgggtgatgcacaagctcaaggtttcttgttaggtgcgactgcgggtcgtacaacattgaacggtgaaggcttacagcaccaagacggtcattctcacatcttggcgaacacgattccaaactgcgtatcttatgacccatgttttggttatgagttggctgtcatcgtacatgacggtttacaacgtatgtatgtgaatcaagagcgtgtgttctattacttaactgtaatgaatgaaaactacgagcatcctgcaatgccagaaggcgttgaagaaggtattaaacgtggtatgtatttattcgagaaagatgaaaaagcaactgttcagttacttggttcaggtgtaatccttcgcgaagtgattaaagctgcgaaaatcttacgtgatgaataccaaatccattcaaacgtttggagtgtaacaagcttcaatgaattggcacgtgatggtatggcatgtgaagaatacaaccgcctacacccacttgctgaagaagttaaagaatcttgggtatctaaacaattacgtggtacggaaggtatcgtagtttctgctaccgaccatatgcgtgcttacagtgaacaaatccgtgcgtatcttccagatggtcgcccatttgttgcattgggtacagatggttatggccgttcagatacacgtgcgaacttacgtagtttctttggtgttgatgctgcgcacatcgttgttgctaccttgaaaaaattagctgacgaaggtgaagtagacgcacgtttagtgaaagatgcaatttctaactttgagctagatactgaccgtccggttgcatgggcgccgcaagcacatccggaagttcagccagttgctgaatacaatgaaacgcaaacaggtgaggggaactaagcatgcaaattaagacccctgatattggtgtagataaagcaaacgtcgctgaaattttagtaaaagttggcgaccgtgttgaagttgacgacagtatcgttgtgcttgagtctgataaagcaactgttgaagtgcctagcacttcagcaggtgtcgtaaaaagtatcttgattaatcaaggtgatgatgtgactgaaggtgttgctttgattgagatcgaagcagaaggtgcggcacaagcagcaccggaaccaacaccagctcctgcggctgaaaagccagctgctccagcacctgcgcaacaaactcaagcttcagctcaacctgctgctacatcaagtgcaactgttgaagtgactgtacctgacatcggtgttgaaaaagcattggttggtgaaatcctcgttaaagtgggtgaccagatcgatgttgaacaaagtattgtggttgtagagtcagataaagcgactgtagaagttccaagtagtgttgctggtactgtagaaagtattcaagtgaaagaaggcgataccgttaaagaaggtgttgttcttattcaagtgaaaacagcagctgcatctaatgcgcaagcagaagctcctgctactacaccagctccagctgcggtagcagaaccggttgctgcaaagcaagaaactgtggcagcggctccagctcagtctggttcagttgatatcaatgttcctgatttgggtgtagataaagctgttgttgctgaaatcttggttcaagttggtgataaagttgatgtagaccaaagccttgttgttgttgagtcagataaagcaactgtagaagttccaagtaccgttgctggtgttgtaaaagcaattcacttgcaagcaggccaacaagtttcacaaggtgtattgcttgcaacaattgaagctgaaggccaagcacctgctgctgcaccagcggcaaaagcagaagcagccccagctccacaggcagcagcacctaaagcagccgctcctattgcaactcagtctgcacctgcggcgcctacatctggtactgataagttaacgaaagagcaagaagcagaaaacgctaaagtgtatgctggtcctgctgttcgtaagctggctcgtgaacttggtgtgatcttgtcacaagttaaaacttctggtgagcatggccgtgttgttaaagaagatatctttgcttatgtgaagagccgtttaactgcgccgcaagctgcaccagtagctcaagctactgctgctccggctggattgccgtcattacctgactttactgcttttggtggcggtgaagtaaaaccaatgacacgtttacagcaagtttctgtaccgcagttgtctttaaacaactacattccacaagtaactcagtttgaccttgcggatattactgagctagaagcttggcgtggtgagctgaaagacggctttaagaaacaaggtgtgagcctaacaattttggcatttattgcaaaagcagtagcacacttgttgaaagaagagccttattttgcgggtcacttagcagatgatcagaaatctgtattgctccgtaatgaaatccatatgggtattgcggttgcaactccagatggtttgaccgtgcctgtactacgtaatcctgaccaaaaatcaattaagcaaattgctgttgaattaggtgatttgagtaaaaaagcgcgtgataagaaattaacgccgaaagatttacaaggtgctaacttcacgatcacaagcttgggctcaattggcggtacagcatttacgccactagttaactggccacaagttgcaattttgggtatttcacctgcaacgatgcagcctgtatggaatggtaaagactttgatccacgcttaatgttgccgttgtcattgtcttatgaccaccgtgtaattaatggtgcggatgcagcgcgctttacaaataaacttacgaaacttcttaaagatattcgtactttattaatctaatgctttgaaagaacatactaaaacctcgcttcggcggggttttgttttaatgtctatttgacttaattttaggttaatctacagattaaacaggacttatcgagagtgaggagacatttctcgttattacataaaggagaaatagtaaatgttgggttttctgaaaattatgttgcccttgttgttggttgtatttttattgatgggaatatgggtcagtattttgcacttcccttgggagtggatgacttatgttgtcatggggattgaagtgtttgtcgctactctgattttaccccttgaatatcaaactggaacaagtagcagccatattggttttatcagtataagtgcttgtcttgcagtgctgttaggaatagcccgtttattcgtatggacatgggtaaaattttttgcctgaatatttgaaaaatagatttagtcgaatataataagcccatacttcattggggagtagccgctattcacagcaaatgtgaataggtgatggtcaacataattgttcaacagaacatggtcatcatagcttaaacgtctcatcgttcctgagttggcaagacctttgatttaccactctgcaatcattttatgatatttggctagcaggaggggtaggtcataggcatttatgctagccagagaaccgacatgcaagaatttctgatttctacctcgattgttgccctcgctgaaatgggcgataaaactcaattgttggcacttttattatctgcacgttttcgtaagccaatccctattttaatcgcgattcttttagcaactttaattaaccatggtatttctgctgtgcttgggcagtggattacaacggttttaagccctgcaatcttagtctgggtacttgcggttggtttcattggtatggcgttctggatgcttattccagatgagcttgatgatgaaacggcgagtattaataaatggcaaaagtttggcgtttttggcgcaacttttattttgtttttcttggcagaaattggtgataagacccaaattgcaacagtcgctttagctgcacgttatgacagcattttctgggtaatgttaggcacaactttaggaatgatgattgccaatgcacctgctgtatttattggcaataagttggctgaacgtttgtctattgcgctcattcataaaattggcgcagctattttcttcattgtaggtgtttctacgctcgtacagcattacttcttttaaatgattttaagcttatataaaaacgcactcattaagagtgcgtttttttataggtaattttaatagttaaatttcacagtaaagttaatttgacgtggattacctaaagtcaccaaattttcgttgagagcacctgcatagtaatctttatcaaatagattacggatcgcaagttgggcaccccaacgctcagcatcataacccgcttcggtatcgaatactgtatagcctggaacatgcacatctaaaccatcaacggttttataagtttcacctcggaaaccaccacctacataccaaccaagttttgatgatggatcaaatttgtaacgagctgacaagctataagcgtgttcaggaatattgtcgagcgctttccctacattgcttgcatttgcatctttactaatttctgcatcaattgtgtaggtatatgcagccgttaattttaaaccttctaaaatttctgcactaagttcagtttcaataccgcgagttaactgttcaccacgttgtactttatagccactattcgcagtatcagtaaccaaaacattctgacgttttagatcataccaagcgatagcaccttgaattcgttgatcgggactttgtaatttcatcccgacctcaacctgttttcctttttctggcttaaatgggttgctatttacgtcagtaccactatttggagtaaatgatgtagcgtagctcacataaggtgccacaatatcattgagggtatacatgacagaagcactgcccgtaaatgcattatctgattgtttactcgcattgccagttactaaacttgtagtttgggtttgtgcccaatcttgacgtcctgataagcttaaaagtaattgatcattaagctgaatacggtcgcgtaaatagagccctagatatttgagacgattgatatcacgtacattttgcttcaatgtcacgttctgaccatagatagggttatagatatttaaatcaccaatatcatatttatcattggtgtaatcacttttttcctgaaaagcatcgactccaatattaatgtcgtgctgcatgccatatagatcaaactgtttatttaaacggttatcaatggcgaagcttaagttatcaataacttggtgtcggctgttatttctacggctgatagtcgtataatcaatttcaccttgtttatcttttgcccaaaagttactacctgtacgagcaaagactgctttgccatccattttggttttttgtacggcaaaattctggttaaagttccagccattatcaaaagtatgtttaaacgtataaccagtgcgataaacatctgcctcatatttaccgaaattaggatcgccaatatctctgtaacgacaaatttcacagaacccttatcctatcagggttctgccttcttaaaattgccaaaatttccttaaactcttcttttttcccaaaaccaattaaacgctgaatcgccatttgaacatagtctaaaccatagcgaaataaactcattgagagtcgtccatgcttctttatttttatcgcttttttttgatcatgttgccattcacccgttaagtaacaccaacagaagcttatagctaacaccgcaatcaattttttcactcgtctagggtctgtcaagcgcgtattttcaagattaaacccgcgtcctttgagacaactgaataaggtttcaatttcccagcgtaatgcataatcctgaatagcattggcattaaactgaggagaaacgacgagtaaaagctctccattttctaactgtagtgcacttatatatagtttcacccgaccaaccaaaatccgtcgtttacgacattcaatttgaccaactttaagatggcgaaataaatcactaattttatgattctttcctaaatgattggtgacaatgaagtttttttaacacgaatgcagaagttgatgtcttgttcaattaaccatgtaaaccactgctcaccgataaactctctgtctgcgaacacattcacaatacggtctttaccaaaaatggctataaagcgttgaatcaaagcaatacgctctttcgtatctgaatttccacgtttattaagcaatgtccaaaggataggtatcgctattccacgataaacgattgcgagcatcaggatattaatatttcgttttccccatttccaattggttctatctaaagtcagttgcacttggtcgaatgaaaacatattgaaaatcaactgagaaatttgacgataatcaaaatactgacctgcaaagaagcgctgcatacgtcgataaaatgattgtggtaagcacttgatgggcaaggctttagatgcagaagaaagattacatgtttgctttaaaataatcacaagcatgatgagcgcaaagcactttaaatgtgacttgttccattttagatatttgtttaagataagatataactcattgagatgtgtcatagtattcgtcgttagaaaacaattattatgacattatttcaatgagttatctatttttatcgtgtacagagcgccaatatataaactacgatctataggtccattagggttgtcttttaatgtaccaattacaggtaaaccttgctgacgaatatattcacggtgttgatagcttgcgattacagagaggtcagtgttatcaccgaggtcaaaattataagaaggcgagatataaaaatttttaaaataaacataatcggtcggatcatcttgatcagagatacgtccatttaaacggaaagcacctttttcactattgtttgggctgtagtttaaatcgaatgttccttctttaaggctgtaactaccataagtcatgctagcacgtgcaaagctttctgcttctggtcttttagtcactaaattgaccataccacccggagcaactaaaccgaaattaatagaagcaggaccttttaaaatttgtacctgatccataccagatagttcggtggcaacataagtattttggcctacccttaaaccatcgacatacaccgagtcagaagaagtttgcccacggataatgaaatcatcccaaccgcggcgaccaagtttcccagcttctacgcctgcaacaccttcaagtgcatctgctaaagttcttgcttgtttttggtcaagttgttcgcgagtgacgacagaaactgattgagcagttttaaatagaggtgcatctgattttaaagctgaatttgcttttgttgcgacataagaagtggggttttctttttgtgcttgaatagaaatagtgggtaacacattggttgaattttgctgttctgccgtttcttcagcatgacttgttgtcattgaagtaaaaatagcaactgctaacaaagtttttgaagttgaaaaagcaaagcgttgagtcatgggaggcctaaacagcacaaaaagtaaatttgataatgagaattattttaatttattgcagtttaattttaaataacattatgattcatttataaaataagaaaagcaaaatcaattttaaaatattatgagaaaaatagagtaattcattgcatgagttattgaatcccattattttattatggaaataaaaatatctaatatttaaagtttttttggggaattttatggggtttgaaaaaacaacatcacagatattatttgataatggcgtacacaaatgtattagttttaccagtttggtcaaaggggaaggcatacaagccaatcaatttttaattattgatcatgagcgtgctgccgtgatcgacccggggggtgatttgacctatgttccgctgacaatggaacttaataaatatacacgccttaaaaatcttgattatgtgatggcttcgcatcaggatccagacattataacctcaatgccccgctggttggtttataccgatgctaaagtggtggcctcaaaattatgggcacgttttttacctcacttaaattcatcatttatgagtgagcgtatgaaagggaattgggaagaccgtctgattgagctgcctgatcgtggtcaagtgattcaattaggtgaatcgaaacttgtaatcgttccagcgcattttctacattcggtgggtaattttcagttttatgatcccgttgctaaaattttattttcgggcgatatgggagcatctattgtagatgatgcaagtcagcctctaaaagattttgatagccatgtgatgaaaatgaaagcttttcatcaacgttatatgtgttcaaataaagtcattcgcttatgggtcaacatggtccgtcagatggatattgaaatgattttccctcagcacggtagtccatttattggtaaagagatgattaatcagtttttagactggattgaaacattgccatgcggtgtagatttaatgacagaacaaatttttagctgtccaacataaaaaataatgttcgacatattgagcccaatttgaaatttttttaggatttcgcgtcgcagaaaaatttttgatgacgagaatttgaataaaaatgttatctcaagttgcgactccagatgaatgcctacgctgtggggcatgttgtgcacattttcgggtttcattttactgggctgaagccgagttaatggaagaacatctagttgaacctttgacacctgtctattcatgtatgcgtggaaccaatcagcctgagccccgatgtcaggctttgacgggtgaaattggtaaagaggtgggttgttccatctatgcggtgcgtagttctacctgtagagaagtgcagattgctgatgagcagtgtaataaagctcgtttagcgcaccagcttattcctcttattcaagttagcccggcagattcagagaatgatcacgactatgatcaggtgagttaaatataagctaacacaataataagtgggaaatatttagagtaggcgaatatctattgctgaaaaaggcaaagataatatgaaaattgcatcgaaatttgtttataatagctcacggaatttaccagtgagattgttatgctgaccatcgttcaagaagcgctaaccttcgatgatgtcttattacttcctgcctactctactgttctcccaaaagatgtctctctaaagacacgtttaactcgcggcatttatttaaatatcccattagtttcagctgcaatggatacagtgactgagtcacgtatggcgattgcaatggcgcaaaatggtggtatcgggattttgcacaaaaacatggatattgctgctcaagctgcagaagtacgccgtgtgaaaaaattcgaagcgggtatggtgaaagaccctatcactgtaagccctgaaactacagtacgtgaactgattgcaattacctctgctaataacattagtggtgtacctgttgttaaagacggcaaggttgttggtattgtgacaggccgtgatacgcgttttgaaaccaatttagaacaacctgttagcaacatcatgacaggccaagatcgtttagtcactgtacgtgaaggcgagtctaaagaaaatattcaagcattattgcaaaaacaccgtattgaaaaagtcttggtcgttggcgagagcaacgaacttaaaggcttaattacagtgactgacttccgcaaagctgagagttatccaaacagttgtaaagatgatcttggtcgtttacgtgttggtgctgcggtaggtacaggtgctgatacaccaagtcgtgtggaagcattggttgaagctggtgttgacgtcattgttgttgatacagcacatggccactctgctggtgtaattgaacgtgtacgttgggtgaaacaaaacttccctcaagtacaagtgattggtggcaacattgcaactggtgatgctgcattagcattattagatgcaggtgcagatgctgtaaaagtgggtattggtcctggttctatctgtacaacacgtattgtggctggtatcggtatgccacaaatttctgcaattgacagcgttgctagtgcactaaaagatcaaattcctttaattgcagatggcggtatccgcttctctggcgatatggcaaaagcgatcggtgcgggtgcaagtacgatcatggttggttcattacttgcaggtactgaagaagcgccgggcgaagttgagtttttccaaggtcgttactacaaagcatatcgtggtatgggttcattaggtgcaatggcgggagcaactggttctgctgaccgttatttccaagattcaaaagcgggtgctgagaagttagtaccagaaggaatcgaaggccgcgttccatataaaggcccaatgggtaacatcgttcatcaaatgatgggtggtttacgttcatcgatgggttatacaggttcagctgtgattgaagatcttcgccaaaatgcgaaatttgtgaaaattacttcagcaggcatgtcagagtcacatgttcatgatgtaacgattactaaagaagctccgaactatcgtgttggttagattttggtaaccaaaacaatcaagaaagccgtcagtacactgacggctttttgtttttggtgtaaagtaaatccgatgaaaagagatatggcggaatagccatatatgaaatgagccacggctgaagtggcgtaaaaatgagataagctatgagttattttggaacggatggtattcgtggaaaatttgggcaaatgccgattacgccagagtttgctttaaaactcggttttgctgcagggaaggtattaaaacgaacgagtccgaaaaataagccacttgttgtattaggaaaagatactcgtttatccggttatattttagagtctgctttgcaggcgggattaaatgctgctggtgtatatgttcacttacttggaccattaccgacaccggctattgcacatcttacccgtgccttacatgcacatgcagggattgttatttctgcatcacataacccatattttgataacgggattaagttcttctcaagtgaaggtaaaaaattaccagattcattgcaggaagaaattaataaagaattagaaaaagatttatttatcgaagacactgcaaacttaggtaaaagtgttcgtgtgaccgatgcaaatggtcgttatatcgaattttgtaaatctacattcccatatcattttgatttaaataatttaaaaattgttgtggattgtgcgcatggcgctgcttacagcgttggcccttcagttttccgtgaactcggcgctaaagttgtcgctttatacaatgagccagatggtttaaatattaatgaaaactgtggttcaactcatccagagagcttacaaaaagcggttgtggaacatggggctgacttaggtattgcctttgatggtgatgctgaccgtgtagtgatggttgataagttcggtaacttaattgacggtgaccacatcttatatattttagcgactcaggcaaaaaacaagccagcaggtgttgttggtacagtaatgagtaacatggcacttgaagttgcgcttgaaaaagcaaatgttggctttgttcgtgcaaaagtcggtgaccgttatgtattacaagccctagaagaaaacggatgggtaacaggtggtgagccttctggtcatattctgactttagacaagagcacaaccggtgatgcgattattgcagcattacaagtgttaaccgtgatggttgagcagaacaaagcgctgcacgaattggttaacggctttaaactgtacccacaagttcttgtaaatgtacgtttggaacaaatgcttgatccatattctattcctgcattagttgctgagttcaataaagctgaagagcagctcaaaggacgtggacgtattttaattcgtaagtctggaactgagccagtcattcgtgtcatggttgaaggtgataacgagcaagaagtgaaaactttagctgaacatttagcaaatgcagttcgttcacaggcacaagtcgcataaggtgtatggcatgagtgatgtcattaaagacttaagtgaattgcgcttaagctatgaacaaggtgagttgtacgagactcaagttgctagcaatccccacgagcaatttctaggttggcttaatcatgctttagcagctaacttgcatgaaccgtatgcaatgtcattagcaactgcgagtgctagtggtcgtccgcatgtcagaactgtgttgttacgcggtgcgacagaagcaggttatgatttctataccaactatgacagtcaaaaaggtatagatttggcagaaaatccatatgctgaattgttattttattggccaagtctagagcgtcaggtacgagtaggtgggcatgttgtaaaaattcctgaacaggaatctacagactactatcataaacgtccacgtgatagccagattgcagctcatatcagtactcctcaaagtggcaaaattgaaagtcgcgaattgttacaacagcgttttcaagacttgcaacaacaagttcaaagccacgaagtactcgataagccggaattctggggtggataccgtctacagccggattattatgaattctggcaagggcgaccaaatcgtttacatgaccgcttgagttatgaaaaaatcgacggtcaatggacgttgcaccgactgatgccttaaatgacaaaaatacaaattaaacaaagacctttattgacacgccctgaacagtttcagggcgtgcctccgtttattgccgaaattttggcaagacggggcgtacaatccgagcaagaactagagttaaagcttaagaatttattggctcctgaactcaaagggttggacgctgctgtagcattaatggatcaagccatcgatgagcagaaaaaaatagttattgtgggggactatgacgctgatggcgcaaccagcactgctttaatgatgctcgtgcttcgcgatatgggagcacaagtcgactatttggtaccggatcgttttaaatatggctatggacttactcctgccattgctgagcttgctcatcacacctatcaacccgatctattaattacggtagataatggtatttctagtcatgctggtgttgatgcagcacatgccctaggcatgcaagtgattattactgatcatcacttaacgactaaagaaaccccacttgctgaggcggtggtaaacccaaaccaattaggatgtgagtttccaagtaaggcacttgccggtgttggcgttgctttttatgtacttgccaatttggcgagtctacgcaatagacagggtaaaagcacaagtaaagtgactcaatatttagatttagtcgctttgggaacttatgccgatgttgctgttttggattataacaaccgtattttggttgatgccggtgtaaaacgtattcagcaacatcagtgtcgagtgggaatcttagccttactcgatatcgctggtcgggaagctacttcaatacgtgctcaagatttaggttttgtgctcggaccgcgcattaatgctgctggacgtatggagagtatgcgtattgggatcgagtgtttattagctgacacgatggaaactgcataccccattgcccagcaattaaatcagttaaatatcgatcgccgtcaaattgaaggggagatgaagcaacaagctttatctgctttagacagtttacaactctcacaacaagatattcccgcggcgcttgttttgtttgaagaaaactggcaccaaggtgtcatcgggattgtcgcgggacgtttaaaagaacagtttcatcgcccaacgattgtgtttgctccagatgaagatggtattcatattaaaggctcagcacgttccattgatggggtgcatattcgagataccattgaacaagttgccgaacaacatcctgagctggtgagtcattttggtggacatgcggcagcggcaggcttaacgattcgtaaagaaaactttgaagcttttaaaaccgtatttaatgattgtgtagctgctatggatgaatcaatctttcaagcgacattatggaccgatggtgagctacctgtctctgctttgcaattagataccttaaactggattgagcgattaggtccgtggggacaaaaatttccactgcctcaatttgaaggatattttaaagttatcgattttcgttggctcaaagagacacatttaaagcttagattagcgatagaccaatatagtttcgatgctattgcttttaatgcagcaggtcgcttcgagtttgatccgatgcgagaccatgtgcatttggtttatgaaatagaccgtaatgtctttaatggtaatgtgagcttacagctacgcattgtgcatttaaatcaataaaaaaatccgctcaattgagcggattttttttaatctaggttagattagaagcggtatgctgcacgaacaccataagtgttgtcgttatcaccgaatccaacacgaccttcaacacttacttgctgatttaagaattttttagcattgataccaaattcatctttatcagttaagtcgttattgtagtagtccacacctaaacttaaagttttatcgatgtagtagtcaccacgaactttatattcgtcaaggtcaccaaacgcaccataagcttcaaggtttacgtcatgttgaccaacttgggttacatacttagcacgaacggtaggatctgcaccgtctttaccgtctttctcgtcgtaacctttaacacctagagcaagtaataaaccaggagctggtaaataacctacttctgcagcataagtagtcactttactgtcgatattagtgttgtcgatttcacgttcgtttctgcctacatcaccgctaaggtaaaagtcagagttaggaacgaagtactcaacgcctacgccatattgagtgtcttttgtgccgctgttatcgccatagttaacatgtgcgttaacgttacttgcacggtttaagaatgctgcttctgcaagcggtgcattacgtgtttgaacagggttgaaataataagtcccatcaacaccgaatttgcttacgctgctgccgttatctggatcaagataattgtaagaaccaccaacttcagcttggtaagcgtttgctgcgccacttactgcaagagcagataaaagagctgatgcaattgctagttttttcatggaatctctcccctctaaaaacgattttataaatgttttgttacaacttttagtctagagcaaaatcatttaccgtcaatcttgtccaagtaactggactgtaaccatgtgctttttatgtaactatatttaatttaatatattgattttaaataataaaaaaacaatgttttattttattaaaaatgaggagattttgtgtagaaacttaaaaatgctggaaaagtacccaattttgtatggggatgttacgagttaagcttaaaatctactgaaagaaaattagcaaacttattcattgaaataagagttagcgattaaagcaggttcgaagataaccgtagctatgataaaatattcaactgtttatctgcttttatgggaacactcgcgtggaaattaatccttatctaaaccaattgaaagacttaactgatcgtagccaaacactacgggggtatctttgactacgatctaaaaaaagaacgtttagaagaagttttacgtgagttagaagaccctgcgatctggaatgatcaaaaccgtgctcaggcaatggcgaaagaaaagggcgaactagaaaacgttattaatgtattagatggcttatctacacagcttgaagatgcaaaagcaatgttggatttggctgtagaagctgatgatgaaagcttgcttgaagatgttcagtctgaactgagtactgctgaagaagaattagcaaaacttgaattccgccgtatgtttagcaatccaatggacccgaatccttgctatgtcgagattcaggcgggttcaggtggtacagaagcacaagattgggcttcaatgctattgcgtatgtatatgcgctggattgaacgtcatggttttaaagcagaacttatggaagtctctgacggtgacgtcgcaggtattaaatctgcaacgattcgtgttgaaggtgaatatgcgtatggttggttacgtacagaatctggtgtacaccgtttagtacgtaaatcaccatttgacagtggtaaccgtcgtcatacttctttctctgcggtatttatttctccagaagttgatgacaatatcgaaattgatattaatccttcagatgttcgtactgatacttaccgtgcatctggtgcaggtggtcagcacattaacaaaaccgattcggcagtacgtttgacgcatattccgactggtattgtagtggcatgtcagaaccaacgttcacagcatgcgaaccgtgatcatgcatggaaacagttacgtgcaaaattgtatgaattagaaatgcaaaaacgtaatgaagctgctcaagcacttgaagactcgaagtctgatattggttggggtagccaaattcgttcttatgtacttgatgactctcgaatcaaggatttacgtacgggtgttgaaaattcaaatactggtgcggttcttgatggtgaccttgatcgttttattgaagcgagtttaaaacaggggttataagagtcttttgaacttttaattctctataactcttaaatttttagcgattaaaacggcaaagcagttcagtgtttggaagttaatcggaaaaatacgatatgaatatcgaaaaaaatagatatgaatatcgtcaaaatacgatattatgtttccgaaatgctgaacaaagctttgttcgtttacaagacgtgttgagcctatggatattgatgcaattagcaaagccctagccaatcctctgcgtcggcagattctgcaatggttaaaagagccggagcattatttaccggtagaagagtgtggtggtagttttgaaaaaggggtttgcgcaggtcatattgaacgtttgggtaaagtagctcagtctacgatgtccaatcatttgtctgtattacagcaggcgggtctcattcaggtccaaaaatatggacaatggtcttatttttcacgtaacgaagctttgattcagcaatatatcgaacatttaaaacaaacactttaaaacaaataaagtgtaagtcgaggcgatcatggctgaactcaatactcccttaatagttggtgattttgaaattaaaaatcgactggtaatggccccattaacacgtgcgcgtagtggcgaaagccgtgttccaaacgatttaatggtgcaatattatcagcaacgtgcaaatgctggtctcattctcactgaagcaacagtgattggttcaaaaaccgtaggttatgcagatactccgggactatggtcacaagagcaagcacaagcatggaataagattattgaagcagttcatgctcaaggttcaaaaattgtagttcaactgtggcatgtgggtcgtatttcacatccagagcttttagatggcgatattcctgttgcaccgagtgcgattcaacctgcgggtgaagtaagtttattacgccctaaacgtccatatgtaacgccacgtgcgctttcaattgaagaaattcaggaaattgttgctcaatataagcattcagctgaattggctaaagcagcaggttttgatggcgttgagctacatgcagcaaatggttatttaattgaccagttccttcaaagtaatactaaccagcgtgatgatgagtatggtggtccggttgaaaaccgcgctcgcttgttattagaagtagttgatgcctttattgaagtgtggggcgctggccgagtaggtgtgcatattgcaccgcgtggcgactcgcatgatatgggtgatgaaaacccgctagcgacatttggttatgtggttgaacaactcagccaacgtaatgtggctttcattttctctcgtgaatatgaagcagctgatagtattagcccacaattacgtaaaaaatttaatggtgtatggattgccaatgaaaatctgacaccagagtcagcaaaacgtatcttgcgtgaaggtcaggcagatgctgtatcttttggtaaagcatatatcgctaacccagatctattacagcgtttagaacaaggcttaccattaaatgaacttcaaccaacgactttatatgctaaaggcgctgaaggatatacagactatccggctttagaagcttcataagttcataatattatttaaatttactatgtgctgaacttactcttttgtgagttcagtaaatggcttttcttgtatatggtagagtttaggtatcgaaactctgccattttttttatctatgttatattttccgcagtttttgaattttgactatttgaggcaaaccgcttggcgaccccattttggtacaacaccgcactccatttattaaaaccgttttatcgttggcggataaaaagacgtgcagaaagtctagaattatatcagcaggaatgtctggaaagatttgggccgtttgaagcaccgaagaatgtaaaagcgatctggtttcatgctgtttcagtcggggaaaccaatgctgcacagcccttaattgaatattacctaaaacttgggcagccagtcttagtgaccaataccacgaaaacaggtcaggctcgtgccaagtcactttttctaaaagaaccatatttagatttatttcaggccgtttatttgcctgtagaccagaagcctcttttaaaaaaattttttgagttatatcagccaaagcttttagcactggttgaaactgaactttggccaaatttaatcgatcaagccaagttacagcatgtaccttgtttgctgcttaatgctcggttgtcagaaaaatctgcaaaggggtatggcaaagtctcgggtttaacggcaggtatgttaaaacagctggactgggtgttagcgcaagatagtgcaactcgtcagcgttatgttgagcttggtttagacgaacacaaaagtcaggtcgttggtaatattaagtttgatatccatgcaccagaggcttttgttaaacaagctgcccaattgcatcagcagtggtatctggaaaaccggcaggttgtgacgattgccagtacacatgcacccgaagaacaacaaattttggaagcactcgcaccttatttaaattcagatcgtgagttggtgtgtattgtggtgcctcgtcatcctgagcggttcgatgaagtattcgaaatttgccaaaatttaaatttaattacacatcgtagaagtatgggccaaagtattcatgccagcacgcaagtttatctcgctgacagtatgggtgagctctggttatggtatgccttaagtcaggtgtgttttgtaggtggttctttaaatgagccgggtggtgggcataatattttagaacctatggttttaaatgtacctactgtggttggaccgcgttattttaactttcaaacgattgtcgatgagttcattgatgaaaatgctgtgcttatcgctcaagatgcacagcaggtcgttgatatctggttagcatgtctggcagaacctgaggcgactgaacagttggtggtacaggcgcataaagtgttgcaacgtaatcaaggttccttacaaaaacatatcggggtgattaatcgctatctggccgaaaaatcatgaatattgttttactagagcctgaagatgttcaatcggatacatggtctatccattcaaaacgtcaattacagcatttgcgtgaacatcttgatattacagtcggccagaatctaaaagttggtattcgtaacggcgcccgttatatcactgaaattgtttcgatgaatgagcatgaagtccgtatacggcctatttgtgaagaactactaccagcaaaacttccggttcatttaattgtagctttaccaagacctaaagttttacgccgtctaattatggacagtgtgactttaggtgttgaaaggataagcctgattcatagttatcgtgttgataaaagctattggcaaactccttttttacagcaaatagacaactacgttacgctgggacttgagcaagcaggcgatacaattgttcctgaaattcaactctataaacgctttaaaccttttgttgaagacgtcttgccaagtttaattacgcaggaaacacctgcctatgtggctcatccttatgctgagcaacgtatgccaattaatattagccatgcttgtagtgtagtggtcggaccggaagggggatttattccttacgaagtagatttgctcataaaaaacggctgccaagctatgagcttaggcaaccgtattttaagaaccgaaacgtctatttcttatattttaggtcgtttgtttagctgatgtttcagggtttaaagctggtggattagataccatttttaattcctgaattgggtaaggaatatcaatatcattttcattgaaagcttgttttacttgagcttgaatattactaatagatgaagagatatcagtttcagtggtatcaacccaccagcgtacagtcaggttaaccgagaaatctgctaaagctgtgacgttaactgaaaacgcaggttgactcagtacatttcggtcattattgagaatatctaaaataatctgttttgctttttgctcatcatcgtcatagccaattccgactacgaactcacagcgtcgttgttgataagcagtattaacagttaaggcacttgtataaaccgttgcatttggaataacaatacggcgaccatccggtgagcgtaggaaggttgcacggatctggatgtcttctacagttccttcaagtgaattcaccacaattgaatcgccaatacggaatggctcgctcaataaaatcaaaatacctgaaagcaggttttggaatatatctttaaatgcaaaaccaatggcgaccgaaccgatacctagcgcactcatgagctggcctggtgtgaaccctggaatcataatgacaagggctattaagaaaccaaagaataagatcgctgtactaccgacacggtttaaaactaaaacaagattttgacgagtataagagcgattttctaaagtcttacgaacaaagaacttaaataatttggtcagtagccaaaaaataagaaaaacaacaattgcaatgcagatataaggtacacgttcccaaaaactatctacgattttgtcgatagtggtataggcatcatggtatttctcggtatgcgctaaaactgtttgagtggttttagtacctgcttcttgcaaaagttcgcctgtattttttgcaacatccgttaaggatttttgttcatcagccacgacaagtctctaattgaataaattcagaaagccttttcagcttccatcatagtaggagataaaatgtgcgcctactataatgagttcatctaaataataaagtgttttttaattaaaagtattccgttcctttttgtaagatttgtgtcggggtttgaatagtatcggtaccagagaagtagtaaaaaaagcctgctgtagaaataaggctaattaaaatagcgattaaaataagccaagccatcagtttttctataaacgttgaaggccgaacgggaccatattgattagtgcccgctgtaccagaagcaagcagtaaataaagcataaaaaagaactgaacgactggaataaataacagtagtcccatccagccacttttatttaaatcgtgtaggcgtcgaacgaccagaataatgttgagatagatcagaaatagccagaaagcccagaccattaaagcgcttataccagagagagagctgtaaaattcaaaattaaatagatcacttgaaagctgaaaacttccaagaaacgaagccagaataaaatagcccacgattgtgactaaataaatcagaccatatccacctaaataactcattcggttaaagcggccatgaattgaaaaagggctgtctttaaacgggagttgaggtggacgtgaagagggagtttcggcaaacatcttattttattcctgcactgcttctaaaagctaaaataatctttgttgatgatcaaaaccatcaaaacttaaaaaaattataaaagtaaaagctatagacaaatgttttaaatcaacttaattttataaaaatgttcataatttcgtatgcttgagtaagtgattaatatatgaccaaagtcgcattgtctaggctttgaaagagtcatcatactgaaaaggcaaacaaataagatccagtaaaataatagccacagtctcgagatgggatgcacaagatcaaggaagttgcgtatgaatgagatctatccagtaccagaggaatttaaaaaaacagctcgtactgttgaagcagactactttaaacgttatcaacactctatcgagaacccagatgaattctgggcagagcaagctaaaattgtcgattggataaagccatttacccaagttaaaaataccagttttgacaaagacaatttcaagattgaatggtttgctgatggtgagttgaacgtatcagcaaactgcttggacaggcatcttaaagaacaccctcacaaacctgcaattatttgggaaggtgatcatccttctcgtcataaaatcgtttcttataaagaattacacgacgaagtctgccgtttcgccaacgttttaaagaaatatggcattggtaaaggtgaccgcgttgtgctgtatatgccaatggtgactgaggctgcaattgccatgttagcctgtgcccgtattggtgcggtgcactgcgtggtatttggtggtttctcaccagactcgttggcgagccgtattgaagatagccaagctaaacttgtgattacggctgactcaagcctacgtgccggtaagttgttaccacttaaagaaaatgttgatttggctctagcattgccgggcacagagtgcgttgaaaacgtgattgtggtttaccgtaatgcaaacccaatcgagatgaagccgggtcgtgatttgtggtatcaccttattattatggaggtggatgcaaactgtcctccagaaccaatgaaggccgaagaccctttatttattctttatacctctggctcgacggggaaacctaaaggagtgttacatactacaggtggttatctggtgtacgtagcgagtacctttaaagaagtttttgatttaaaacaagatgatgtgtactggtgtaccgctgatgtcggctggattacaggccatagttatctaatctatggaccattggcaaatggtacgacgaccttaatgttcgaaggtgtgcctcagtatccaacatgggcacgtcttggtcatgtggtcgataaacataaagtctctattttatatacagcgccaaccgcgattcgggccatgatgcgagaaggtgattcgtatgtacgtgaaagtaaccgtagtagtttgcgtttgttaggttcagtgggtgaacctattaacccagaggcttggaactggtactacaacgtagtcggtgaaggccgctgtccaattgttgatacatggtggcaaaccgaaacaggtggtattttgattgcgccattaccgggggcaacagctttaaaaccaggttcggcaacacgtcctttatttggtattcaaccagcgattgtcgatggtgaaggcaatgaactagaaggcgctgccgaaggtaaccttgtgattaaagattcatggccgggccagatgcgtaccatttggggtgacccagatcgttttattgaagcttacttctcgacctttaaaaatacttattttacaggtgatggcgcccgccgtgatgaagatggctattactggatcacgggtcgtgttgacgatgtcttaaatgtttcaggccaccgtctaggtacggctgaaattgaaagtgctcttgtatcgcatgaagcggtggcagaagctgctgttgtgggtatgccgcatgatattaaagggcagggtatttgtacttttgtgactttgcaggcgggggttccagagtcggaagaactgcgtaaagagttaattagctgggtacgtaaagtactcggaccagtagcttcaccagatgcactgcactgggcgccggcattacctaaaacccgttcgggtaaaatcatgcgccgtattttaagaaaaattgcagcgaatgaactggatagtttgggcgatacctcaaccctagctgaaccggcagtggtggatcaactgattacgacagtttatcctgatagacaaaaataacgttttaataaaaaagctccgataggggcttttttattaaacctgtttaaaattttgctagaaattcagcagtattttgtacgcttgcaaatataccaagagtagctaaaaaagcagtttgtacatcttcggctttaacagtttttccgttatggtttaaatcacgggtcgcagtggcatctccaattaagatgggttgataacctaactctttggctgcacgtgtgccagaatcaatacaaatatgtgtcatcatgcctgtgatcacgagttgttcaatttgatgtgcttttaaaagttcttctaaattggtttctaaaaaactgtttggataatgctttgtcacgattaatgaatcactgccagcactgagttctggatgaagtaacacaccttcagtattttcttgaaagaagctggcttgtggcgggttaatatgttgcacataaataattggtaaatctttttcattaaaatattgctcgagctgttttattttatcgagcgcttgatctggtccaaccaattccattttgccatttttaaaataatcattttgtacatcgataactaatagtgcttgtttcatgagaatactcttgttggtataagataaaacaaggttattctctgctcgcaaaatcggctatagtcctatgaaagcattatcgccagttttctttcgccatgaaaaatgaatattgaattagacccgattgatctaaaaattattgcattgctcaagcaagattctcgcttaacaaataaagaaattgggcagcgtgttcatcggacagggcaggcagtaggtgctcgaattgctcagttaatggatgcaggtgttattaaaaattacaccattgccgtgcaatacaggcataaacaatttattcatttgcatttaaatgaacagcgctcctttgaagaaattgaaaatttagtaaagcaatatgaacaaatcgatgagtgctttaaggttatgggtaatgcttgttatatgatcgttagtcatttcgaaccagcagaactcaatgcttttattgaagtcctctcaaaatggtgtcgttactcagttgaaactgttattcgagaagtagagaaagcttaaaaaataaaagctccaagccgagtcttgggactgttctaaattttgtgtaagtacttaattttcatttatccttcagaggataattacaaaaggtacttcacatggatgaagcaacaatcaaaagtatggctgccgaattggctaaaggtctaaaaacaccagaagacttaaaccaaatgacagcagtctttaaaaaattcatgattgaaactgcactcaatactgaactttcagaccatctcggttatgaaaagcatcagcccaagaaaggctcaaatagccgtaatgggtttagttctaaaaccattacaactcaagatggacaactggctttagatattccccgtgatcgagaaggttcatttgagccacaaattatcaaaaagcaccaaacacgcatcaccagtatggatgaccaaatcctctcactgtatgcaaaaggaatgactaatagggaaattgtagccttcttcaaagaaatgtacgatgccgatgtgtcagcatctctcatcagcaaagttaccgatgctgtgattgagcaagtgactgagtggcaaaatagagccttagatagcctttatcctgttgtctatcttgactgtattgttgtcaaagtccgtcagcactccaatgtgattaacaagtccgtataccttgctttaggcatcaatatggatgggcaaaaagaattactgggtatgtggattgctcagacagaaggtgccaaattctggctgtcagtcatgacagagctaaaaaatcgaggagtacaggacattcttgttgcctgtgtagatggattaaaaggcttccctgacgcgatagcctctgtttaccctcatactgatattcaactgtgtatcgtgcatgttgtacgcaatagcctgagatttgtaagctggaaagactacaaagctgttacgtcgggtctgaaagcgatttatcaggcaagtacagaggaaaatgctttaaaatccctagacatcttctgtgatcaatggaatcaccagtatcccaaaattggagaatcctggcgggccaattgggaaaatatccgaacgatctttagctatccagccgaaatacgtcatgcaatttatacaacaaatgcgattgagtcgttgaatagcgtaatacgccattcaacgaagaaaaggaaaatcttttcatctgatgactcagtaaagaaggtcatttacttagcaacatcaaatgctgcgaagaaatggacgatgccaattcaaaattggcgtttagcaatgaattggtttacgattcagttcgatgatcgattaaaagatcatttataaaaaatggaacttacacaaaataatttacaggctccgagtcttggagccaatatgtctttatttttatttattgtttttattgtcttgcgctgttttaactggaggttttaggctgatttagcttgaatttctacctccttttcctgttgtagttctaactgacgaacgagcggcagaactttttcaccaaagtattccacctcttcaataaagtgtaagaaacctgaaagaatcaagtcgacacctacatttttaagcgccacaatccgctctgcaatttgctgaggtgtaccaattaaattggttttaaagccatcgttatattgaactaaatcttcaaaagttgattttgcccagttgccttcttgttctggtgaagcggcacccgcttcacgagttgcatcgccaaacgcatttactgcttcagtgttggctttatcaataatttcttgaagtactgcttttgcttcttcttcggtatctcgagcaataatgaaagcgttaaccccaattttaacttgatggttattggcttttgctttggctcggatatcttcgacctgtttttgaatttcttcgacagtattaccattggtaaaataccagtcagacacacgagaggccatgtcacgtgcggcacgtgaactaccaccttgaaagacttcaatatgcggtttttgcagaggtttcggcttaagtgtgtagttctgaaattggtaatacttaccatcgaaactatagttatcggtggtccagattccttttagcgtgcgaataaactcttcagagcggacataacgttcatcatgctcaggccattcttcgccaatcgcatcaaactcacctctgaaccagccacttaccacattaatggcaatacgaccttgagttagataatcaatcgttgcgagttgtttagctgcaagtgccggtttccaagggccgggcagaatagccgcaatcactttaagtttctcagtttttgcaagtaatgcatgactgaaactcacagattcatgctggttttctgccccgtaccctgccgtaaaacgaatttgggtgagcgcatattcaaaaccattgttttcggctgcctgtgcaagtcgaacattgtagtcataactccagtctgtacgctgttcgatgttacttacgacaaggccaccgcttacatttggtacccaataagcaaatttaattggttgttgtaattgcgtcatggtgctctctccccattcgttatttttatttagctatattgcgcttaggcaacatgcgttaatgatttaccggacttatgatgcaaacgagattctgctgcatcgagatttggtacagctgctgaaggcaatacttcttcttgctcaatttgcttgttaataccgagctcttgattcgcttgctgagatttaggtttaaccacttcagcacgtttacctttcgctggtgcccattctaaaattggcaatgcacgcgctacggctagcgtaatacggtcagataactgttcacttttcaccgtatattcaggagtaaagtcgcgatctgttgcgtatacgccaattggtaaagtttgcgcctgaaagaagctaaacaatgggcgaagctgatgctctagtactaatgcatgacgatcactaccacctgacgcagctaaaagtacaggtacatctactaatgcagtttgttcaacgaagtcaaaaaagtgtttgaaaaggcctgtaaaagaagcacggtagacaggcgtaccaacaattaaggcatctgctgcttcaaccgctgcaaggtcatcttgtacgcgctgcggaagctggttgcgataaaatgcgccgcctaataagggcccgatttcactcaatttaataaagtgaactttaatatcaattgcttcagataactcatcaagaatggcctgaaccagactttcggttttagatggcgtattcaaaccaccagaaacagcaacaatatttaagggttttgatgatgtgataccagtcatgatttggttcctaagcctaaaaaagaagattggacttattaatcaacaatgctggcgaactgtaaaataacgaaattggtcaaccttatcagttttaaatataaaacccgaatagttgatttttattatttaatagcgaattaaataactgtttttattttatataattattgatgatatattttttagaataaaaataaagcttatataaaaaacagattaattttgattaaaaggtaaaaaacatctgaaaatcgaagcaaaggtctgtatttaacaacattttgcataaaaatggataagatgagcatatctttcatctaaatagtagggttacaataggccatacttatgctcaagattactttaatcgcttatgaatattttaatcgttgatgatcatcctttgtttcgtcatgctttgattcaagcagtacgttatagcctgccgcaggcacaaattcatgaaacagcttcggttgatgagttttatgagcgtttggaaaatggggcagaacctgatctggtattactcgatttaaacttaccgggtgcttcaggcttttcggctctggtctatgtaagagcacaatatccatctattcctattattgtggtttctgcacacgaagaagcgtcaattattcaacgtgcaattgcgcatggtgcaatgggttatattcctaaatcggctcatccaagtcatattggcgaagcaatccgtcaagtgttagatggggaaatctggttaccgccaaacttgccatcaaatattaatcttgatccgagagcggcagatgaaactgctttggctgaacgtattcagtcgttaacgcctcaacaattccgtgttttgatgatggttgcagaaggtttattaaataaacaaattgcttatgaactcgatgtttcagaggctaccatcaaagcgcacgtaacggctatttttagaaaactaggcgtacaaaatcgtacacaggctgtattggcaattagtgcattaaatattgaagataaaaaaatctaaaataaaaaagacctcaattgaggtcttttttatatgttccacttaggcaaggcaatcttgcttaggtgttaggctatcgcagtacagtgggttaagagcacattgcaaatcatcaatttgttcttgggtcacatagcccttgctttttaaatattcagctacacagtcatcacgcaagcttaagaacgccgcatcataaacacctaaatcaacaaagagagctgcggtttctagactattgaaccggtcaaggaaaatatcattgccatacattaagaagatatggtcaagttttgctttttcatctacatgcaaacgttcagcaagttgatgtggaggtgtcttaataaacagcaagtcagaaagctcatcgaactgagtcatatctaactggttttctccgagtttgacatgaccaagccaagccttgaaaaccagaacagcaccaccgcgtagaagcatactccagatttgatggcgtgtctcatggtcaaggttttcactttcagcagtaagaacttttaagaagttctcttcttgttgggctaatttatcaaataaacctaagccttgcggatgataggcagcaggcgcaaatacatcaaaatttagatcatgaaatacattaagtgcgagaggtacagcacactgataaatagtattgagtgctttgatatgtgcttcgctcagcttgctatgcggaaaaatactttgccaatctaactcaggaagtaaggcattggcactgtattgacgataaaattgttgagacgagagttgcccttgtggggtgttatcagaaatattcatggcagttatcctttgcattcattctagagcagtgaagctatatagattggaaatcgatttgataattcgttatacaatttaaaaattcgttttgaatatttatgtgtcatgaagaatgcaagtagaatacgactaaagtcgtataaggtgattttttgtaaataatctattataaaaacaattatttattaaattgtaactaagtatacaagtgttcacttacaaaaaaggtgggctttgccatagaaaaaaaggcattggaaattttggtcaatgatttaccgggtaaaagtagactttttgagcagttctgcctattggcttaaattcagtcaaacatttttgccaagaaccgcttcccaaacttatcaaaggttgggaagcgataaatgattagtctgtcgtgctggcaattttaagcccagataaccatgctcttaatgaagcaggttttaacggttttttgagtaaaacaatattcagttcttttaattgctgcggtaactctgggtgcgagtccgctgtaattaaggcaacaggaacatcttcttgacgattttgagtaataaaatcaaccccaagttgattgtggtttaaatgctggtcaatgagccaaacctgaatattctctttttgaataatttctagcgcctgttcaggttcagtcgctttgaaaacttgataaccccatcgtcctaataaactactcattccttcaagaatagtttcatcattgtctaggcacaaaatacggtaggctttagtttttaaaggtacggcttgtacagctggtgttgcaacttttggtggctcgacaataggtacttcaatcataaagcatgagcctttgcccaactctgagtaaacatgaacagggtaatttagcaaacctgtcatacgttgtacgatggcaagtcctagccctaaaccttgttcaccccaaggtgataaatgcccgcagcgttcaaactcttggaatagcttaatccgttgttcttcagcaatacctggtccagtatcccaaaccccaattcgaatatgtccagactgctgcgcagagcggagtacacccaccaccactcgacctttagcggtataacgcaaagcattactgacaaagttctgaataatacgacgaatccactgcgggtcggtatcgatccagaaagacacatcgtggactttcagtgagatatttcgctgagcagcgatcgatttaaactgcaactcaagatcactgagcaaatcatgcaacggataaggttgtctctttggttgtatggtgccgccttccaaacgtgcaatatcgagtagggcagagagcatactttctgctccatagagtgctcggtcaagctgttgtagggtctggcggtcttcttcggtcgaaatactttgctcaagaacagtactaaacagacgagcagcatgcataggctgtaatagatcgtgacttgccgcggcaataaatcgactttttgacatattggccatatcagcttgttcacgtgcaagctgttgttcagttaaggcatcggcaagctgttgtgttctatcttttacgcgggcttcaagcacggcttcgttcgcacggaaggccgtaatatcggcaaatgtcgttacaaagcctccacctgcgattggatttcctctcatttgaattacacggccatctttacgaatacgttcaaattcgtgagcacttcccactttcatccagtgaaggcgtttacgcacatgttcttcaactgaaccgggaccacattcaccgcgttcggcgttataacgaatgaggtcggcaattgggcagcccacataaacgaggtcttttgggtaaccaaacagttttaaatattggttgttccatgcgaccaaacacatatttttatcaaccacgcttacaccttgggtcatgtggtcaatcatggtcataagaaggttctgattaaaacgttgccactgcgatgcttggtctaaaatattagccacttgccctaaagcaagaccgttattaatcattgctgttgtgagcaatgtacgtgcagaagcggcaccgataataccggccagatattgctcggtaaaacgccaccacatgccattggcaatactatttgggttgagggtgaggtgattttgctcacaaaaattttcgaacgcttgcgtagtgggttgctcacccgtaattctcttggctagggcaaataaatcacccacttttaagcgggccgcatcatgcggaagataggttaaatcagtagatgtgtgcggtgatggtaaaggctttgtttcataataaaagaagctttctgcctgaatttgctcagcgacgcttggtcgataaatttttgaaatccagatatataaaacaatatttaaaccgagtgaccaaataacaccgtgagttaaaggtgcaaatgactcaaaaccaaataaagattccgggcgtagggcattaatgccgaaaggaccgaaaagtaaaatactttgagcagtttcctgataggcttcaggcaagctacgcaaaatagttggaaatagtaatgtataactccacattaaaaatccaataataagtcctgcatagacgccttgacggcttccgccacgccaatacaaaccaccaatcagtgcaggtgcaaactgtgctacagcactaaaagccaataagccgaaaactgaaagttggttaatgtcattaaagaaatggaagaataaaaagccaagtagcatcactgcaacaatactgatacggcggctaaatttaagaactttaggtaaatgcttatcgtgacgtgacagcaacttaaatcgccatagagcaggcataatcaagtcgttactgagcataatagacaatgctactgatgacaccagtaacatgcctgttgatgcagaaaacccgcctaaaaaggccagtaaggccagccactcttggttataacttaaaggcaatgacagcacagccacatcaggcacggtcagaaacttcggtgcggcatgtaaagcccagcttgcaatcggaataatggcaagaatagttaaaatgagataaactgcgaaccatttacgggcaccgcgaatatgcttctcatcgcggagttcgaccacagccacgtggaactgacgtggtaagcaaataatggctaaacctgccaataatgtttgaatccagaaagtttcgggtacaccaaagagctgaacctcctgaaaagtctggtttacatcagaggtcatttggctcaggttggccggtgattcaaaaataaaaaataaagcgacacaaagtaaggcaaataacttcacaaatgattcaaatgcaactgcaagcatgaggccgccgtgttgctccgtgtttgcaatctgccttgtaccaaaaatcatggctaaaattgcaagcacactggtgagcaataacacgctgttggtcgtcgtatgaatatgcgagctttgctccataatgaccgaggtacttaaagcaatcgcacgcagctgtaacgcgaggtaggggataattgcaataacggcaagaatagtcaccaacgatgcgagtacaccacttttaccatagcgtgccgcgacaaagtcagcgattgacgaaatcgcatgatgctgacgaactcgacctagacgccgccagatatcataaccaaaccagacaaataacagtggacctaaataaataggtaagaagatgacaccttcacgtacggcagccccagttgcgccatagaatgtccaagaggaacaatagacacctaaagttaagctaaataaaaacatacggccacgcgtgctaagacgactggcatgcttctcaccaaaaaaagcacagacaaataaaagcgcaatataaagagtgagcaccccaataatcagccagctgttcatatgacctacataagtgaaaccttatgcctatcataacccaagccgaaacaaagctataaattgattaaattttaacgaccaaagtctaagttacgactgagctggaatcttgctaactttaataatgaaaaaatacattaaaaaaaagtgaccaaggttgggcactatgtaaggagtttggttatggatcaaagccaagtagaacagattctacgtaatccaaagtttcaaaaaatggtcaagaaaaaaagtgcattaagctggacgctcacaatcatcatgttagtgctttatgtgggctttatgctacttgtgggctacaacaaagaatttttgatgagttcctttagtggtggtgtaacgacatgggggatcccgctaggtttaggaattattgttttatctttcctactttgtggtgtgtattcctatatcgcaaataatacccttgaccaattgagtgaagaagcgttgaaggaagttgaagccatcacgcatgagaaaggactacactaatatgaaatggaattcattcaaagcgaaagccttattggcagcagcatcgctatattcaactgttgctatggcaagcccggacttaggtgaagcagaacagcaagccaccaactggcatgccattatcatgtttatcatctttgttggctttaccttgtttattaccaaatgggcggctaaacaaactcaatcagcgcaagacttctatactgctggtggtgggatcagtggtttccaaaacggtttggcgattgcgggtgactatatgtcagcagcgtcattccttggtatttctgcaatggtgtttagctcaggttttgacggcttgctctattcactcgggttcatggttggttggccaatcgttttattcttggtggcagaacgcttacgtaaccttggtaaatataacctttcagacgtagtgtcattccgtcttgaagaaaaaccagttcgtactttagctgctttcagctcgcttgttgtagtcgcgttctatttgattgcacaaatggtaggggcaggtcagctcatcaaactattatttggtttgaactataacattgcagttgtgattgtcggcttgctcatgatggcatacgttattttcggcggaatgctagcaaccacatgggtacaaatcattaaagcagtgatgttattaagtggtgcaactttcatggcctttatggtgatgaaagcggttggtttcagttttagtaatatgttcacccaatcaattgaagtgttcagtaaagttcatgatgtaagctttgaagatgctgcaaaaattatgggaccaggtaaacttgccgcaaacccgattgatgccttatctcttggcttagcactcatgtttggtacagcaggtcttccacacattcttatgcgtttcttcacggtaaaagacgcaaaagaagcgcgtaaatcggttgtcgttgcaacaggttttattggttacttctatcttttaactttcattattggtttcggtgcgatccttttcgtatcaaacaacccgcaattccttgatgttgcgaaaatggcaatgaccggcaaacttgagcttgttggtggtaacaatatggcagccgtgcatttaagtgacgctttaggcggtgacttattcatgggcttcatttcagcagtagcgttcgcaacgattcttgcagttgttgctggtttaacactttcaggtgcatctgcgatctcacacgatttatacgctaacgtatttaaaaaaggtcaaaccacgccagcttcagagcttcgcatgtcaaaaatcgcgacgcttggtttagcaatctttgccatgattttaggtattttgtttgaaaagcaaaacgtagcattcatggtaggtttagcattctctgtagcgtgttgtgcaaacttcccaattcttgttctttcaatgttctggaaaggtttaacaactcgtggtgcggtcattggtggtgtagttggtcttgtaacagcggttgtactcattattctgtctaaagcagtatgggtagatactttaaaaatctctgacaccccaattaacccgttcaatggtcctgcattatttgcaatgcctttgtcgttcctttgctgctggttcttctcggtaactgacagctcagcacgtgcgaaaaaagaacgcgcttctttcgacgctcaatatgttcgttcaatgacaggtattggtgcttctggcgcatcagaccactaaaatcacaaccacttgaacatctcaaaaaagccctacggggctttttttatttatctcataaagtattttgaaagaagctccttaataaagaacaacttgtttatcctattttttgtacagtatgattttctataatccaaaacataatgaaaaaatggaaaataattaaatgcgatctatcattgaattctggtcgagctttcgattgttgccttctgcatggctgctgttggtgcaattcattttacttattctggctatgctgacttttgataatgaggcttacaggaccttaacttgggcgctaggggtacttgcattactcattattgctaaagttattcgccaaacacccatgttcacttttcttggtctcgcatttgtcagtggggcaattatagcttcggtctttattttattaggctatagcaatttaaccatccagatttttgcccatagctgtgaagccttagcttacttttcggctgcttatggtttatttcgctatatgtttgctgaccgatatttaacccgcgatgagttatttgcagctgccgcagtttttaccttgctggcttggggatttgcatttttatataacatttgtcagttactcattcctaatagctttcaaaatccaaaccacatccatcacttacaaacttggttagatttactgtttttaagctttagtttgcagtcagctacgggactgtctgacttaatgccccttagtccaccagcacgtgttttagcgatgttacagatgttttgtggagtgatgtatttagccctaatagttacgcgtttaatcgctttacaatatattaagcacacgcctaaaaagaattctgataaataaagaaggaggtgttttaatttatttacacctttgtaactgcaatattatttaagtttatttaaagtattatcggctttctctattgaaagatataactttgttcattcctgaatgtctttattggctttaagcctgtcattttcattaaaataacatggaggatttatgccttccaaacaagcgagttggttcgcaaatgttaatcccaatgtctttttgggtacggtcattattattgctttgttcttagcagttgttgtgatcgctccgagttcttttgaacttctcacgcaacagttaaagcagtggatcactgattcttttagttggttctatgtcttatcggttgccttctttcttatcctactcatttatattgcctgttctgcgattggacgtattaaattaggtcctgaccatagccaacccgaatatagtaacggatcatggtttgccatgttgtttactgcgggtatgggtattggcttaatgttctttggtgtggctgaacctgtcatgcactatgtcaacccaccaagtggtgagccacagacaattgaggcagcacaacaagctttacgtgtaacctttttccactggggcttacatgcatgggcaatttacgccgtggtcggtttagcattagcttattttgcttatcggcataatttaccgctaaaaacccgttcagcactgtatccactgattggtaaaaagatttatggaccgtggggcgacagcatcgatatatttgcgaccattggtacggtatttggtgtagcgacttctctcggatttggtgttacccaaattaactctggtttacattatttatttggtattgagcaaagcaccactactcaggttttactcattatttttgtgagtattctcgcttcattatctgtgttcttaggactagataaaggggtcaaacgtttatcagagctaaacttagtattagctttaatattattagtattcgtttttatcgctggccctagtatttatttacttcagaccactattcaaaacactgggcagtatatctctaacctttttaccatgacattcaatttatatgcttatcagccgaatggatggattgggggatggacgattttatattgggcttggtggatttcttggtcgccatttgtaggtatgtttatcgcaagggtttcacgtggtcgtaccattcgagaatttattgtcggggtactcctcattccaacaggctttaccattatctggatgggctttttaggaaatgctgcgttatttagcattatccatgaacatcaaaccactttaattcaggctgttcagcaagactcgtcagttgctctatttgagtttttaggacacttgccatggtcaggtgtcatgaatattctggcgactattttggtggttttattctttgtgacttctgctgactcaggggcattggttactgactacttaacagcaaaaacagaaaattcacctacttggcagcgcctgttctggacagtgcttatggcggtgctggctattattttactcttggtgggcggtcttgcggcgcttcagtcttcaatcattatgagtgcgttgccttttaccgtagtcatgctgttaatgagttggggcctaataaaagccttgcatcttgatgttactaaaatgatagcaattcaagaggctcgcattacaccacgtgccattcataaccctagaagctggcagcagcgtcttggtttaatcatgcattatcctcatagtgaagaagaggtgaagcaatatattgaaaagcaggtttcacgtgcttttgaaaatattcagcatgagtttagacgccgtcatcttgaggtgtcgattagtgaagtggaagatggtatgcagcttcgagtcgatcatcatcatgaaattaattttatttataaagttgtttcacgtgaaacagtacctccaagttttttaattggtcgtacagaagcagaagacggtcagtattttcaagctgaggtatttttgagagaaggcggacaaaactatgatgtaatggactggactcaggaagatttgattcaggatattattgatcagtacgaacgtcatttacatttcttaaatatcgtacgcagttaatagccataaaaaaaggactcaattgagtccttttttttaattcaatttctaaattaaattagaaacggaatttagcatttaagccgatagtttgtgtatcgtagctagactttttaacgtcagctttcatgtaagatgcaccaactgctaaagcaggagtgatgaagtagtttacgttaccaccccaagcttggcggaattcaccaaggtcattacctttgatgtcagcttcgccatcgttaccaacgaaagtagcgccaacacttaacttaggagttaagtaaaggtcagtttttaaaccgtattggttttcttgaccgaatgcaccagcagcttcaaaaccgattgccatgttagttccatcgattggaccaacatatttagcacgtgctgtaacagcatcttggtcgttttggatagcagcagtttggttaacagcagagtagataccgttaccgatgataccgaagttatctaaagcgaattggttagcaacacttgtataaccaacagtcattaagaagttaggtaacaacatagcaccaacttctaatgcataacggtcaccgttgtcatctttagagaagttgtttttaccatcaacatcagtgtggttgtaagttgcgctagcatatacaggaaggtaaggagttggaacgtatgcctcacctttaacaccgtatgtaccaatgtggtagtttacgttgttttggtcatattgttgatagctataacctaaagacacgctagaagcttggtttaagaaagctgcttcagctaaaggacccttagctgtatcaacatttttcaaatagaatgtaccagcaacgtcaccagtgaagtttttatcatttgcagttgtgtcaacatattcagattgaccttgaacttcaaattgataagcatgagcaccggtcatggctaataatacagcagtggctaaaccaagttttttcataatcatttccagcattaacaagagataaagctggggtcattgtattgtaacaatttatgaagtcaataatagatgaaacgtaatgttaaggaaatttgacacttatgttaaaaatggttaaaaaaacaacaattgaagtatattatgtcaacctgctaaaaaaatgaacattaacaagagtctaaaccttaagtttcatagggaattgacactaaatagtttaaaaataattacatttacaattgaaaaaagcgattttattaatcggttttaacgttaatttatttgtcgacttgtttaataaatagccactcaaacattattcttttttcaattttgctgtattttgagtaatagttaacactattttgataagttcatctaaataatctatctattttgaattattatataattgaataaagcaaaaaaaatatgtttttaaactaaaaaaacgattaaaaaattaattctgatcaatttaatcaactttacaaaattagagataagtcacacaattcaattgcaaagttcactatctaacatttttagagttagaagtgctttcccagatacgatgtgttatcacatcagactttacgagctcagctttccccaaggttgagcttttttttatctataagaaaacattaatatttattaaaaaaaatacatgaaatttcttctattgagtgtgtataaaaaagaacccagctgagggctgggtttaggatgctgggagaaacatccaagagaaaaaagaagctaattataggattgcgaaatttacatcatctgtaaaatggagttttgctatagccatcatttgctctttcgatcaaatttttaagaaatagaaaagatgaaagcgtatattgcgttaatcgaactttgttgctgaacttctgttcagtaaagtgctaggatgcggattaattacttcattctatagtagtgatcatggtaggacatttacggagtaccagctagaaatgtcaggattacgttcagaacatatcagtaatcgactgtttttcttcatgttggtcattattttgtccttactgtttatggcggttccgcttattgtcagcagttatcaagaatatttaaaaactaaacaagctttggttgaaattaaaagcttaagatcaattgctgaagttgcaaataaagtctctaaagaacgtgcgcccgcaaataaattaatgtcgagtaacgctgccgactttttaaaaaatcaaaaaaacttaaaagaatatcgcctctctgttgatcgccaacttaatgaaactattcatattttaaaagaagaaggttataccgatttagcaaataccttagatactaaatttagagatgatttaaaacaggcgcgtgctgtagttgactattatgttgcaactcctgaacaagcgagaagctctatacaattcgataatgcaattttggctatgtttggagcttgggatagccgccgagaagttttacaaaatttgatgctacagttaaaaagtaaagatagccaaattaacaattattttactttgattgtggttttgactgatatgcgggatcaagctggtcgtaccgcatctaatgttattgcgcctgtgacctttaaagaaactatacctaatgataatcgggcgcggtctttgcagactcagcagcaagcacgctacttatgggcacttgtagacacactacagtcagagcaagctaaaactccggaatatcatcgcctttactcaagggttaaaactgaatttttagataaaggcgtacctattgtgggtcagcttttagatgaaagccaaaagcaccaagcctatcatttaaatggaacagagctgacagaccaaatcgttgataaatttaccacggttattgatttgcaaaagtttttacttaataaaagcgtcttaattgcatctcaagaaaactatttagcaaaaaagaagtttttccttactttactcatttcaagcatatccttagcagcagcgttacttacactaatttatgcaaagagaagggtgtttgagcctcttattcaggcccgtaccttaattcttgatttatctcatagcacagattacccaatagatgagttgaaacctaaaaaaggcgaatttatttcgttgttcgaagctattgatcgtttacaaagaatgctcaagcagcgagatgcttttgaattccagcttaaaaatattgctaatacagatccattaacgggtgtatccaatcgtttggctttatctgagtatttaaaaattgttgagagttaccctcaacaattttctcaaacttgtttgatgattattgatattgatcgctttaaacacgtgaatgatcaatatggtcatattgtgggtgaccaagtgattcggcgtattgcagatcaattaaaagcaaatgtacgggcttctgatttaattgttcgttatggtggtgatgagtttttaattttgttagaacaagtgcagtttttagatgcacgtctcttggccgaaaaaattcgtattgcgatttctttagaggaaattgatctatctggtacacaagaaaaattgcatgtatcggtcagtattgggtttgcgattggagcgacaagctggatggagttattagagaacgctgatcgttcactcttaagagctaaagctcggggacgaaatgtagtagagggataatttaaaccttgtgaaccttattttgaaaaatgaaattatttatgttttattaggaggctattgaattgaaatatactgaattatgaaagtattagataaagaaaaaagattaaaagaattattagaaaataatataagaaatgaaaaaattggtacagcaattgctattactggtccttggggagttggtaaaacttttttttggaaaaagtttatagaaaagaataattttaaaaggaaatatatatatgtatctttatttggtcttcagtcattgagtgatttgaaaacgcatatttatagcaatatcgaaaataatcattctactttagaagttcctagatggattcgaggattaccagctatttttaaagatacaagggtttcacactttggtttaagtacttctactaaaatttttgatagtttgatgtttagtcaggtcaaagatgcaattatttgctttgatgatttcgaacggatgtctaataaattggatattaaagatgttatgggattggcaaattatctaaaattagaaaaaaactgtcaggttattttgattttagatgaaaataaaacagcaagcgaaaataagaaaaattatgctgaatacaaggaaaagttgattgatacaacaattcctattgactcagtgaaatcattaattcaagaaaatacagaagactttgaaggagatgaaatacttgttgagttgatgtttgagtttgcagaaaccttagaaatccataatttcagattttttcaaaaagtaatcaagttatatcgagattttaggaagtcattacctgaggcagtcgctgactcaacaaaagaaactattctaataagaattcttcaaggctacttaattcaggatatacctgaattagaatatggatggaatgactgtaaatattttcccttagatcagcaaaaagattggtctgatagaagaaaaaaaacttataagagcctaattgatctttcaaatgtgtgtataaaaggtgatggtgacctttggtttattgaatttaagaaatggtttgatcaaaaagagaatttttctattgaatcaataaaagagttagctcaatctgaacttataagtgataaaaataataagttaaaagataaactctcggctcttttcgatgagcgagataattatcaggcgagtgatgattttatagataggttattttacctagcttgtcagtgtattggggtctcttctttattagaccttagagcgtgtatctccactttagaagacttcgatgaattagaaaaggcccaattgcttgaaacaaaagttgagctttggattaaagagaaattgtcaaaaaatagaagcgcttttaaaggcagtgggctatttggttcacatggattcgaagattttatccaaatgtttttaaagcagaatccagatttagacttacctttattaaaagatgcaatttataacaagtatataaatcaatattctgaacaagatataaagcgtattactagtgctgataaaactagtctctatcaatttatttttaaggactttcctgaggataatcgatttttaaataccagagttcataaccttgttgttaacttacctaatgtgcaaaaagaacttttaatagagatattaaatgagagagcaaaaaactctaattttcaaaaaaaatatgcaaattatcttatttctaaattaataaacgaaaaaaaggagtcctaagactcctttcttgattacttcaacatcggtttcaagaaacgtcccgtatgggaaatttcaaccttggctacttgttcaggtgtcccttcagcaatgatcataccaccgcccgaaccaccctctggacctaagtcgacaacccagtctgctgttttaatgacatcaaggttatgttcaattaccacaatggtattacccttgttgcgtagctcatgcaaaatatcgagtaacttggcaatatcatggaaatgcagacctgttgttggttcatccaagatataaagcgttttacccgtatcacgtttcgctaactctcgagccagtttgacacgctgtgcttcaccaccagataaagtagtagccgcctgacctaaacgaatatagcctagacctacctgagttaaggtttctaaacgacggtgaataactggaatagcactaaaaaactcagcagcatcttcaaccgtcatttctaaaacatcagaaatgtttttacctttatagccgacttcaagtgtttcacggttataacgtttgccatgacaagcatcgcaaggtacatacatgtctggtaagaagtgcattgcgactttaatcataccgtcgccttcacacgcttcgcaacgtccgccttttacgttaaacgagaaacgacccgcactataaccacgagctttcgcttctggtgtttgagcaaataactcacgaattggcgtaaataaccctgtatacgttgcagggttagaacgtggagtacgtccaattggactttgatcaatatcaacgactttgtccagatgttgtagaccatcaatcgagtcaaacttttcagcggttaaggtcgttgcaccgttgagctgtgttgcagccagtgggagtaacgtacggttaatcagtgttgatttacctgaacctgaaacacccgtgacacaagtcataatgccaagtgggatggttaaatcgacattttttaagttatgacccgctgcacctgaaagtttaattttttcttcaggtttaggtggttgagttcgctgttttggcacttcaattttgagtttgcctgaaagatattgacctgtaagcgagtcggcatgtttagccagctcatcatacgtaccttcagcaatgacaacgccaccatgcaccccagcaccagggccgatatcaataatatggtcagctgcacggattgcatcttcatcatgttcaacgactaataccgtattacctaagtcacgtaagcgaattagcgtttgtaataaacggtcattatcacgttgatggagaccaattgatggttcatcgagtacatacataacacccatcaaacctgcaccaatttgcgaagctagacggatacgctgggcttcaccacccgatagtgtttcggcagaacgagccagacttaaatagttcaggccaacactcaccaagaaatgtaaacgctcacgaatctctttaaagattttatctgcaatttcacctttggcaccttcaaggtttataccttgatagtaactttcggcatctccaatcgacatgcgagtaatgtctgcaatcgttttgtcttttacacgaacatgacgtgaaatttcattgagacgtgacccaccacatgcatcacaagctgcattagacaaatattgtgctaaatcatcacgtacatagttactttcagtttcacgatagcgacgttcaaggtgtggcaaaattccttcaaaaggttgcacgcgtgtatgtttacggccgcgttcatcgatataacttaaatcgattttttctttgccagtaccttgtaagaatttcttttgcgtgtctttatctaactgattccatggtgtatcaagttgaaaaccgaaatggtcggcaactttttgcagcattgaatagtaataaggacgttgacgatcccaaccacgaatagcaccttcactaattgcaagctcagggttaggaatgagtttttcagggctaaaatggctacgtgtacctaagccatcacagacagggcaagcaccaaacgggttgttaaatgaaaataaacgtggttcaagctctgcgactgcgcgatcacattcagggcatgagtgttttgcagaaaaaacacgatctgggtgttcgccattcatccacgataaaactgcaatatcgccacctaaacgtagtgcagtctcaaatgattcagcaatacggttgcctaagtcatcacgtactttaaagcggtcaacaacgacttcaatggtatgctttttctttttgtcgagttccggtggtgtatcaatatcaatgatttcaccatcaacacgggcacgaacgaaaccttgaccttgtagttgttcgaacaagttgctgtattcacctttacgctcacgaacaacaggggcaagcaacatgagtgcagtgccttcctcaaggttttttaccgcatcgaccatttcagaaacagtttgcgcaaccataggtaagtcgtgttcagggcaataaggcgtaccgacacgtgcataaagcagacgcaaatagtcataaatttcggtaatcgtaccaaccgttgaacgtgggttatggctagtagacttttgctcaatcgcaatggctggtgataaaccttcaatcgagtcaacttcaggtttttccatttgcgataaaaactgacgggcatatgccgaaagtgattcgacataacggcgctgtccttcggcatacaaggtatcaaaggcaagagaagattttcctgaacctgatagccccgtaattaccacaaatttgtcgcgtggaatatcgagtgacacattttttaagttatgggtgcgtgcgcctcgaatacggatatgactttggctcataaaacatctcaattgtgtattgatgaaaatttaggtgttgagtgatcagccgcagggaggtgtgactggttataaacaacagaccctatatatgataacgatttaaaattgttcaagtggtataaaatgatttaaagcgacaaattgtgacggttaaacgacaaacgacaaaatttgtttaattaagcaggttgtatttttaacattcctccttctacatttctactctaagcaaattttaaccagcaacataattttactagacgactggtctaatagttgtttatgatgaatgcatgaaacgattaaataaaagcgaaaccacacgacaacacattttagataccagttttgaactggtactacataaaggttttgtcggtgttggtttgcaagaaattttaaaggcttgtgacgtacctaaaggttcgttctatcactactttgcttcaaaagaggcgtttggctgtgcgttgctcgagcaatacatggccaattataaagtccgtatggaacagctttggcagcacagtgagcaaagtgcccatgcccgtttaatggctttatggcaagcgtggattgatgatccggtacatggtagctgggctgaaaactgcttgattgtgaaattggcagccgaagtttcggacttgtcagaagatatgcgccaaattctcaatgacggtgtgcacaaactaacccaacgtttggctttgctactcaaagaagggcaacaagaaggatcaattccaaaacatattgatcctttgaaaactgcgcaagtcatgtaccagttatggttaggtgctgctttactcacaaaattgtcgcaagacaaagcgcatctacatctagccttagaaaccacccaacaactcttaaaaccgatagaggaataaagcatgcgaagtattatccatcgtaattttggcgaacctgtagacgttttagagcaggcggatatgccaaagcctgaaccaaaagcaggcgaagtgcgtattaaaaccatcatgtctccgatccataatcatgatgtatggacagtacgaggaagttatggctataaaccaaccttacctgcgattggtggcagtgaggcagttggtattgtagatgcgttgggtgaaggtgttgaacatgtacaggtagggcaacgtattgccgttgcggctgtgcatggcagttgggctgaatactttattgcgccagcgcaagggattattccactcaataatgaaattgatgatgaaacagcagcacaactgattggtatgccaattagtgcactcatgctactcgactttgttaacgttcaaccgggtcaatggctcattcaaaacacggcgaatggtgcagtcggtaaaacggtggcaatgattgcgcaggcacgtggtttacctgtgattaatctggttcgccgtagtgatgcaattgccgagatgcaagcattaggtattcaacatgttgtggcaactgatcagccgaactggaaagagcaagttaaacagattcacggtgaccaacctcttattgccggtgtggactcgattggtggaagtgcaagtggtgaaatgctgaatttactcagtgaaaatagcctgctcgtttcgttcggtagtatgactggcgaaaccatgcagatttcatcgggtgatctaattttcaaacaagcgacagtaaaaggtttctgggcgagtgtagttaataaagaaatgccagcagctcgtaaaaaggaactgatcgttgagctgctaacattagcgactcagaaaaaattaatccttcctgtagaaggtgtatttagttttgatgagattaaaactgcggctcaaagagcaacgcaaggcgctcgtcaaggcaaagtattattaaagccgtaaaacactaaaagatcagtcgagagactgatcttttttcatatctttaaaataaaaaggaaaatgtatgatcggacaaatattgattgcgcttattgcgatattacatgtttatattttagtgttagagatgtttttgtgggacaaaccttatggcatgaaagcctttggaaataatgccgaaaaagcaaaactcaccaaagtcatggcacagaaccaaggtctttataatggctttttagcggcgggtttattttggtctttattggctgatgcaccatttgcaacatcaattgccaacttctttttaggctgtgtactgattgctggtatttatggtggtctaactgccagtaaaaagattatttatattcaggcggttccggcattgattgctttagtcgctgttaattttctttaaaaagcgcaaaatacagcgttttgaaatggatatgaccagataggatcagcgcatgtgggcgttatttttaaagtgtatgttgggggctggagttgttctcattatttcgattttatcgaaaagtaaggcattttatattgcgggtttagtcccgctttttcctaccttcgctctaattgctcatgtgattgtttttcagcaaaaaggagccgaagcgttacaaaaaacggctttgtttggtctatggtcactgattccttatgccatttatttagctgctgtttatgtgctggcaacgcgtatgtcgatgtggtcttgtctaggagtcgcaacgctatgctgggttgtggctgcggcaggtttgatttacggctggcaattgtttcaaagttaaattaaacactgaccatttaatgaactaaatggtcagaactcatcttattttagatctgatctaaacctaaccattgtctttgatggtaggcactatcccaaaataaccattcaagttttgcacccatggtataggctgcatgcattttctctaaagtatctgcatcacaacgtgcggcaactttatctaccgtcgcaatcacattacgaacggcggtatggaattcttcacctgcgtaggtatcaatccatgcctgataaggattgtttgggacagacttactcacaatgtctttaccgacttcggcataaatccagaagcaaggtaatagagcagcaagtacaacagggtagctttcagaccaagcagttgctgtcaaaaatgaagtgtaatgatggcctgccaaggtcaatggggtatttttaaattcttctttggtgacaccaaagtttttcataaagtcgtcatgcaaactgcgctcgaccacaattgcaattttagctgcatcagaaaactgcataatatcgtcagcatcaaaagctttagctgctgcaacagccagcacacggccataggccactaaatattgagcatcttgaataacataatgacaaaaagcttctttatctaaagtaccgttagcaagttcctgattaaaaggcaggtcgagaattttttgatataaatttaaattacgttgccagagttcttgagaaaaaagcataaaaacattccatttaaaataagacagctaaacccgattttaaatcaattttaaaatacaaaaataataatgatagatatatcgcaagaaaatatttaatacgattaataagttaatgaaatattataaatttctttattaaacagtgagataaagtaaagtgaataacggcacaaaacaacatcgttttgtggttaattatcgatataatagccgcggttttaagaaagattaaatttagttcttggtataggtctgatccatgaagcatttccgattttcgatattttttacggtggtgtgtttagcactatccgcttactggggttttacccatggacctgaagcgggtgtgtcaaccatgcttaaagctttaaccattaccgcgattttagctgtgatggaagtttctttatcttttgacaatgcggtcgtgaatgcatcggttctacgtaattgggacccgttctggaaaatgatctttttaacggtaggtattttaatcgccgtttttggtatgcgtctgattttcccagtcgtgattgttgcagtgactgctgatatgggtgttatcgaagtagccaaaatggcacttaatgatccgaaaacctattctgaacgtttaatggcacatcacgctgaaatttcggcttttggtggaacattcctattattggttttcttaaacttcttctttgatgacgaaaaagaaacgcattggtttagatggcttgaatctaaacttgcaagcttggcaagcgtaccggcaatgtctgtatttcttgctttgattgctttaatcgtgatggctgcttatgtggacgaagttcaccgcttagctgtggtcatggcaggtatttggggcattgtggtttatattggcgttgaagtgttaagtcatttgttaggtggtgagcctgaaattgatgaaaatggtaatgctgtattacaagatggatcaggcgccgcttctggtgttgtaaaagccggtttaggtggtttcttatatcttgaagtgttagacgcatcatttagttttgatggtgtaattggtgcatttgccattactagcgacgttgtcgtgattatgctcggtcttgcaattggtgctatttttgtccgttcaatgacagtttatcttgtagaaaaaggtacgttagatgcctatgtgttcttggaacatggtgcgcattatgcgatcggtgctttagcattcattatgattgcaagtggtacaggcgtgcatgtaccggaagttgttacaggtttaattggtgtagcgttcattgtttgggcggttatcgcttcaattcaatattcgaagcgcgagcaacagtcgccttaagctaattttcagcaaacttcgataaactaaagaggctaaacgcctctttatttttttaagcccaaatcgttattttaaataaggtgtcccgtatttttagaaacgaatcggcttataatttacttagtttgataacgtgtattgatatgatgaatgctttggaacgtcgctcaacttttgccttaagtagtatttttgcgctacgcatgttgggcttgttcatgattattcctgtcttttctgtagttgggcagtcatatcaatatgcgactccagcactcattggtttggctgtaggtatttatggtttaagtcaggccattttacaaattccatttagcttacttgctgaccgttttagccgtaaaccgcttgtggtctttggtctattgctctttgcgattggtggtgcaattgccggattatctgacaccatttatggcgtgattattggccgtgctatcgctggggcaggtgcagtttcggctgtagtcatggcacttttagccgatgttacgcgtgaagagcagcgtactaaagccatggctgccatgggcatgagtattggcttatcttttgtagtcgcttttagtcttgggccttggctcacaagccttgtaggtatttctggtttgttctttgtgacaaccatcatgggtttgatcgcgattgcgatgttattgctggtgcctaaagtcactcgtcaccatcgtaattatcagcaaggctacatggcacagcttaaacaagtcattcaaatgggtgatttaaaccgtttacacgtttcggtttttgcattgcatttattgctgaccgccatgtttatttatgtgccgtcacagcttattgagtttgcgcatattcctttggcgagccacggtttggtgtatttgccactcttggttattagtctgttttttgcatttcctagcattatcatcgctgaaaaatatcgcaaaatgcgcggcattttcttaacagcaattacaggcattattgcaggtttgcttcttcttatatttggttatcaatcaaaatatgtattactcgctggcttaggaattttctttattgcctttaatgtcatggaggctttattaccttcttggctgtcaaaatccgctccaatccagtcgaaagccaccgctatgggggtaaatgccagtagccagttcttaggtgctttttttggtggcacactaggtggtcaattattgatgttacataatactgcgattggatggagtgtcttagcagggattgctataatatggctgctaattagttttggtttagctcagccgcggtatttgtcatctattgtgctgccattgccgcaagtgcaacaggtgaatgagtggaccacacaactattggcaattcgtggtatcgaagaagttgtggtgatgcctgaccagcaagttgcttatattaaagtcgataaacagtctcttgatgacgcttcgcgacgtgatttaacgcagttgttcggtaaagaggtagccatttaagcataactcttataaagtaaaacatagaaatgtataggatgaagacagctaatgcgtggtgtaaataaggttattttggttggtactttgggtcgtgatcctgaaacaaaaacttttccaaatgggggctcgttgacccagttttctatcgcaacaagtgaagtttggaccgataaaaatacaggtgaacgtaaagaacaaacagaatggcaccgtattgttttgcataaccgtttaggggaaattgctcagcagtttttacgtaaaggttctaaagtttatatcgaaggttcattacgtacacgtcagtggacagaccaaaatggtcaagaacgttacactacagaaatccgtggcgaccagatgcaaatgttagatgctcgtcaacaaggtgaacaaggttttgctggcggtaatgattttaaccaaccacgttttaacgcgcctcaacaaggtggcggctatcaaaataacaaccaaggtggtggctacggccaaaacactggtggttatggtggccaaggtggtttcggtaatggtggcaatagcccacaaggtggtggttttgcccctaaagcaccacaacaaccagcatctgcaccagctgatttagacgacgatttaccgttctaatcaaagtttcgaaaaaggcgagtttatctcgccttttttattattcaattccaagtaaacgtaccagtgctgtgccagccgctgccagacaaatcaccaataaaagcggtgcttttttccaaactaagaaaagtgccaaacccaccccaaatatacgtgcgaaacctgcaaaatggtgaccttcaaaaaatgtagtggtcacagcaatggcacagagcaaaacggttgcgccgtttgagagtaaaacttggtatttttcagaaaatgaaaacttggcacctaagtggaaaccagcaaaacggatactgtacgtacccagtgcgagtagagctatccctacaataatcagtaactgttgactcatttttttctaccccatatcaagccaaaaagtgaaatcaggattggaagtcctgcggctaaaaagggtgtggttatcaacgctaaagttgatccggcaaatgcagcttttcgagtcaccttattctttaaagcagaaaaagtaagagcaattaaaatcgctgggaaaatcgcatctaagccaaatgttttagggtctggaatagcgctcccaataaaataacctgcagtgacaccgagcggccaactgagcatgatgcctataccacatagccagtaagcagcctttttggtttcgaaatcaggctgtgccataccaaacaaaacgctttcatcgttcatgatatgagacccaaaatattgagagaatttgcctcgaatcagttcattgaccgcaatgccaaaaggtagatgtcttaaattgacgagtagtcctgcaattgcagccgcaatcgggctaccacctaccgccaagaatccaataaaaataaattcagcagttcccgcgagcacaaatatggacaggcaaagtgggatccaaagtgctaagccataacttgcggcgagtgaacctaaggacataccaacgacactcgttgctaagcacacaaagaaaatcgagcgagtagtatctttactaagttttctaataagagcgtatgtagtcatggcatgatataacgaacgattttccattataatgaataagtctgattgttttgtcaaaacgaacgatcgttttttttatagaacggatagaatgaatgtctcagccaatcgaaattattgccaaaggtttaacgcgtgaacgccaaagagcagggctttcattggcagaggttgcgcgccgtgcaggtgttgccaaatctacactttctcaattagaggcagggcaaggtaatccaagtattgaaaccttgtgggcactttgtgttgcactcaatattccatttgcacgtttgatggaagaaccgagcaatcaagtgcaagtcattcgctgtggcgatgggccaacggtgagttcggagattgccaattacaaagcaattttgttggcgacctgtccaccccatgcgcgccgagatgtgtatttattgattgttgaaccgggcgaagatcgactttcagaaccacatccagttggttcggtagaacatattattgtggttgaagggcgagctttggtgggtttaattgatgaagcggttgagctgggtgttggagactatatttgttatccagccgatcaaaaacatatatttagagctttggaaacaggcacaaaagcgttgttaatctctgaacaaaactaaagaaattcaatctgattaaaataaaaacaaagagccatttaccagcatcttctacaaaaagggccaattttgcgtataaattttgcaattggctctctcttttattacaaaaatggctctcgtttcttgagtgccgaaacgacaaattaaagccattggaagtatgcatacggaagcgccggataagctcagtgaattttctgttttaggaattgggcagaacggctaaatttttaggggatattttttggcttcggaggatttccgagactagccgatatcctccatatattaaggaaaatgatatggcagctcatcaaaatggttctgaagccaatcactcccaaagtttaaaacatggacttaaatcacgccacttaaccatgatctcgattgcaggggttattggtggctctctctttgttggctcaggcagtattatctacaacaccggccctgtagtttttctaacttatgctttaggtggtctactcgtttggttcatcatgcgtatgttaggcgagatggccgttttaaatcccgacagtggctctttttcaacttatgcagaccgtgcgattggtcgttgggcagggttttcaattggttggttgtactggtgcacgctggcgatgctcatgggctgggaagcttatgtagcaggaaagattttaaacaactggttcccgtttataccgatctgggtttatatgaccgtcgttattgtcgcactggttgttgtcaatttacaaaacgtcaagaactatggtgaattcgagttctggtttgcgctcatcaaagtcatcgcgattgttgttttccttgtgattggtagtttagccattatgcatttgtggccttggggcaatccggctgcatctggtataagtaacttaacctctcaaggctttatgccaaatggcggttcgtcagtgattacagctttgcttggggtgatgttcgcctatattggtgctgaaattgttaccgtagcagcagcagagtctgcaaatccatctaaagaaattcgtaaggcctcgaactcggtggtttggcgtattattttattctacgttggttcaatgttcgttgctgtatgtcttattcctcacaacaatgaacttttaaaagattcgacttggggtacttatagtgtaactctgtctgcacttggtattccgggcgcgcgccatatcgtaaattttgtagttctaacatcggtatgtagttgctttaactcagcgctttacacgtgttcacggatgctattctcgttgtctaaacgtggtgatgcaccaaaaagttttggttctgtaaacagtaaaagcagtccttgggtgggcgtgattgtgtcatgcttcttctctgtaattgcggtaattttaactgcaacagagagtatgaatgtttatgacttcttcatgctaacaacaggtgcagcaacactatatgtgtacctgaccattgcttattctcagcttcgtatgcgtaaaaaattagaagctgaaggcgtgaagattgactttaaaatgtggatgttcccttacctaacctatgtggtaatctttgcaattattggtgcaattcttaccatgttgattgaaggcacctattttaaagaagtgatttacaccacagcattgttcggcattattgtgttcttcggattgttgtctgaaaagctaggttggggtaaagagcgtcgtgcaacccatttaactcatagccatgaagaaaagttagtttaaatttttaaataaaaaagagcctcactgtgaggctctttttgtttgttttaatacgagagaatagttaatttagcgtaggtacacctgcttcacgtaagcattggagcaagacaccaaaagccatcaccatatctttttcatttacacaggcaaagcccatcagcagtccacgttcggcatgtgcatgtgattgcatgtagtattgtgaaagtgggcgaactttgacgccacgttcaagtgctgtggctgcaatggcgacatcatcgcaagagttcggtagttttaaaaccagatgtaaccctgctgcttcatcatattcatgaataaattcggggccaagatagcgttgaattaagctcaccaagtaatcgcggcgtttaccatagagcaggcgcatacggcgaatatgcgcttcataatggccttcacgaataaattcagcgagggctttttgctcaagcaagtgcccaccacgataaagttcggccgcaacaatacgtagcggtgaaaataacggcttagggacgaccaaatagccaattcttaaagatgggtaaatagttttactaaacgtgcccatatataaaacaggtgcattattttctaagccttgcaaagatggataaggctggcccgagaaacggaactcactgtcatagtcatcttctacaatccagctattgtgctgacgtgcgatttgaatcaattgtctgcgacgatcaaggcttaaatgtgagccaagcggatattgatgtgatggtgtgacaaaaatgagtttaggcggtactgccggattttcttcgggaataatgccttcagcatcgacaggcatgggctgaatatcgaggccattaatccgtaacgtattacgcattccccaataagcgggatcttcaatccatactttatctcccatatcactcagtgcacgtgagactaaatcaatggcttggtggatgccttcggtaataataatctggtctgcatcgcactggactgaacgcgcaacacgtaagtaatctgccaacgcacttcgaagctcaatacatccacctgcgttgctataaatcaggcgattaatgtcgggttcgcggcttaagcgtgcttgaatacgactaaaaatatgatgtgggaactcagttacatcgggcgctcccggcacgaaagctccccattgatgcggcgaggctgcggcatagcccaataagttggaaccacgctgcgatagcgcataagagctttgaactttcgggcttgaaaccacttttttcttgttttgtgtatttaaaaaactctctggtaatttttcggcaacccatgtgccgtgtcccgtacgggcttctaagtaaccttcagcctgtagctgttcataggcagtgagcactgtatttctagaaacatgaatttcactggctaagtcgcgtgacgcaggtagacgagtcttgggctggatgactccatcaataatggcaccacgcaggcaacggaaaaggcgttgatgtagtttcccttcagtgtcctgttggagtcgttgcagcaaatgatctccaagtaaactacgcaattggctctctcctacagttaaaaagtggctctcgtcagttggcatcagacgagcgaaattacatgcataggcagtcgttgtaaagcaccctgaaaattaagcacaggatgcaagaaaccaaagctgcaactgatgatgaaaatatgagggaatcaaatggatactcaacattctgcacttaacgcacgtaaacagcaagcaactccacgtggtgtaggcgtgatgtgtcagtggtatgcggaaaaagctgaaaatgccacgatttgggacaaggaaggcaaccaatttatcgatttcgctggtggtattgcggttttaaatacaggccatcgccaccctaaagtcattgcagcggtgactgaacaacttactaaatttactcacactgcttatcaagttacgccatatgaaagctatgtggctttagctgaacgtattaatgaacgcgcgccaattgctggtcctgcgaaggcagcttttttcacaacaggtgcagaagcagttgaaaatgcagtgaagattgctcgttgttacacaggtcgtcacggcattatcacgtttggtaacggtttccacggccgttcatttatgaccatggcaatgacaggtaaaactgcgccttacaaacgtgatttcggtgtaatgccagcgggtgtgttccacgcacgttacccagtacctgcaaaaggtatttcagtagatgcggcaattgaaagcgttgaagatattttcagtgaagatattgcgccacatgacgtagcagcaattgtacttgagccagtacaaggcgaaggcggtttcaatgtggtgccagccgagttcttaaaacgtttacgcgcaatttgtgataagcacggtattttacttgtcgctgatgaagtgcaatctggttttgctcgtactggtaagttatttgcgatgaaccattatgaaactaaagcagacctcatcacgatggcgaaaagcttgggcggcggtttccctatttcgggtgttgtgggccgtgcagaagtcatggatgcaccaaacccaggtggtctaggcggtacttatgcaggtagcccgattgcggttgcagctgcgcatgccgtgattgacgcgattgaagaagagaacctatgcgaccgtgcaaatgaattaggcgctgagttagttgctacgcttaaagatattcagcaaacaactagcgatgtcgtaactgatattcgtgcattgggttcaatggttgcagtagaacttgagactgctgaacaagcaaaagttgtacaaaactatgcaatggaaaacgggttgttacttcttacttgtggtaaatacggtaatgtaattcgtttcttatatccattaaccattcctgctgagcaattccgtcaaggtcttgatatcttgaaacaaggttttgcgacactaaaagcagggagtgcaaaagcaatggagcaatctgcatgattcaaaataatttgcagtatttattaaaacatcctgatatttcattagaagcacctgcatcaaatgattatatcgaggtaaatgatgctgctacgggtgaaactttggcatgggttaaaacctatgaccgtgcaggggttgaagccgcaattaatcgttcagcaaaagcgcaagctgcttggaaaaagcaaactgccttggctcgtgctgatgtgttattggcatggtacaacctcatgcttgagcacaaagaaaacctagctcagattttaacggctgagcaaggtaaaccattggcagaagcacgtggtgaaattggttatgcagcatcattcatccgttggtttgccgagcaagcccgccgtgttgatggtgaagtcttaacacctacgttgccaaaccaacgtctgctcgtgattaaacaagcgattggtgttacagctgcaattacgccgtggaactttccggctgccatgattacgcgtaaagcaggtccagccattgctgcaggttgttcaatgctggttaaaccggcagagcaaacgccgttaaccgcctatgcgcttgaagtattggcgttacaggcaggcttaccagcagatgttttaattaacattagtggtgatgcagttgaagtcggcaaaaccctatgcgaaagcgatattgttcgtaagttaagctttactggttcaacacaagttggccgtatcttgatgcaacaatgtgcgccaaccattaaaaagctttcgcttgaactgggtggtaacgcgcctgtattggtatttgatgatgccaaccttgaacaagcggttcagggcatcatggcaagtaaatatcgtaacagcggtcaaacctgtgtctgtgctaaccgtatttatgttcaagatggcatttacgatgcattggcagagcatttggttgaagctgtgtctaagcttaaagttggcgatggccgtcaagaaggttcaacccaaggacctttaattgatgaagatgcgattgctaaagtgcagtctcatattgcagatgctactgagaaaggcgcaacagttcgtattggtggtcaacgctcggcacttggcggtacattctttgaaccgactgtgttaactggcgtaacgcaagacatgaaagtatctaaagaagaaacttttggtccgcttgccccattgttccgctttaaaactgaagatgaagcagtggcaatggcgaacgataccgagttcggtttagctgcttatttgtttactcaaagcacagctcgtcaatggcgagtaggtgaggcacttgagtacggtatggtcggcattaacacaggcgcgatttcaaacgaagttgctccgtttggtggcgtaaaacaatcaggtctaggtcgtgaaggttcaaaattcggcatcgaagaatatgtcgaaatgaaatacctctgcgtagacttatctgagtaagggataaagcgagttcgctttgttctgaacgaaaacatgcagttatactgcatgtgatgtttcacaaaaaaaccggtcatgcccattcatgaccggtttttttatttaagtcggcaaatatccttcatggctttcgggtaaacgacgaagctcatcaatgagggtttcaatgagtttttcgaccaccagacgttggccttttctagacacataaaccaattgtagcatgccaatattcgacttccagtcaggaagaatatgaaccagtgttcctttacgaatttccgattcaacggttaaaaaaggaagatctgcaatacctaaaccatccattacggcatagtaaacacctgccaagtcattacttttaattcgtggttgataaggaacatcaaccgattcaccattacgaatattgcataaatgccaaatataattttgcttttgtgtgcctaagctaatacttggaaagtcctgtaattcggaataatgcttaatggtgcgaccttgcagtaattcaggcgaagccaccagacagtgatcggttttaatcacatcacgaacaatcaaatttgaatcttcattcggttcaaaattggttcgaatcgcaaggtcgatgtcatcatgcaagatatctactcgacggctggttagctcaagagatatttcaactttagggtaggtttttaaaaactgatttaaaatttttctaatttgaaaatgcatcattaaaggcgggcagcttacttttaccaaaccttgaggctcacttttttgctttaataacacgttctctgcacattcaacttgagcaatgactttgcagcattcctcgtaaaactcttgacctaaatcggtcactttaaaatggcgggttgttctttgaatcaggctgacattaaatttattttcaaggtcaataatgcgtcggctgagcttggatttactaatattttcggcctcactggccgcactaaagccgccgtgttttacgaccaaatagaaataataaaaatcatcaaaagagcttatcaatgtccgttcaacccatttaaatgtaagattagaatgcttaagcattctaatcttggcagtagaacttatttttggctagtgttgtgattgtaacttgaaatcaggttacggtagtcagggatatgatttgagaacaatgtgcctaaaccttcaatatcattacgccagtcacggtgtaattcacacgccataccgaaccaagtcatcagctgagcacctgctttagacatacggtcccaagctgcatcacgtgttaattcgttgaaagtaccagaagcatcagtaatcacgaatacttcaaagccttctgccaaagcagatagtgcagggaatgccacacaaacttcagttacaacacctgcaataatcagttgttttttaccagttgctttaaccgcttttacgaaatcttcattgtcccacgcattgatttggcctggacgtggaataaaaggtgcatctgggtgaatttcttttaactcaggaactaaaggaccgtttggaccagtttcaaaactggttgttaaaattgttggaagattgaagtattttgctgcatttgcaacagcaagtacgttgtttttaaatttatccggatcgatatctcgaactaaagaaagtaaacctgcttgatggtcaaccaaaagaaccgcagcattatccttgtctaagcgtacataatcttgagccattttttatgtcctcatgttatcaaattgaataatcaaaaattattgggtaggtcatcagtgcctaaaatcatgctagatgagtttgttgtcgtaattaagtctaaaaaataggattaagaattttaaaaataggacgatctcttgaacaaaacatcaaaatttatgattgtctcataaatgcaataatgtgttgctaatcctgatctataaactgcaattattgaggcgtaaaatcaatctcagttcaagaaaatcctacatatataggagagatcagatgaagaaatttcttggtgcatatcaaaataaccacatgcattgggttggtgatggtttccctgtatataacctgttctcttatgaccgtttaggccaaaccctaagcccatttttgttactggattatgcagcgccttataacttctcaccaaccaccgaacaacaaggtgtaggttcacatcctcaccgtggcttcgaaacagttactattgcctatcaaggtgaagtgactcataaagactcaagtggtggtggcggaaccattaaaaccggtgacgtgcaatggatgactgcgggtgcaggggtgttacatgaagagttccattctcctgaatttgcagagcatggcggtctttttgaaatggtgcaattgtgggtaaatttaccttcgcattcaaaaatgccccctggaaaatatcaagccattgaagctaaagatattccggacattgtactagacgagcacggtagtcatttgcgtgtgatcgcaggtgaatatgcagatgcaaaaggtgcagcaagtacatttagtccattaaatgtatgggacggtaaattggtaaaaggccaaaaacataccctatatgtacctgaagggcatactacccttgttgttgtgctagagggtgcggttgtggtcaatgatacaaaccgtcttgaaggcaaaactgttgcgattttatctcgtgagggcgttgagtttagcttaaatgctgaagaagacactaaattcttagtgttgactggccaaccactgaatgagccaatcgaaggttatggtccatttgtcatgaataccaaagccgagattatggaagcgattaatgattttaatcgtggaaaattcggttcaatcatgcaagaaggataaattgctaagctgtacttaatgatctttaaaagcaaagtaataaaaagcccgctatcaagtgtgaatagcgggctttttcgctgtaaagtttctgtttttatgatggatatcattattgtgtcggcattgttttgtgtgatttagttctcattattatgccaccatgataccgcaaaaaatgatacttgtaaaacgaatgatataaatacagttaaattatcttattttatttaaaagaatttttttaaatttttaaaaaatatagatttttatacagttatcctcttttgtaaaattttatgaaaaacttttgggcttaccttttaaaatttttctatataaattgatgcaaaaaataaaaatctggtagtttttaatacggtgtttttttagggtatgagtgataatcaaaaaaattctcgaaaaatgggacatcattttggatatcgcaattattggcagtggaatggcaggacttgcagcagcaagaattctgaaagatgcaggacatacaatcacgatatttgaagcacttcctggccggggaatggacagtcatagcattgagttcgatggtgggattattgatgcaccattgcgtgttatgaacccgcatctatggaaaaatacactcagccttgctgcacatttaggcattaaaacttttccggttcgtacctatatgtcttgtagctggttatttgaagatcgtactgaaacatggttaaccacatctcgtagccgtattggtaatttcccaattatcaataaccgtaaaggtatccagcaatatggctggcgtctggtaaaagggatgctgcaattaaaaactgcgattcaccagttctttaaatctaaaaatcaagatattactctcgctgaatttattaatcagaacgatattgaagaagtattctggcatggtgtagttatgccggtgctttatacgatttgtacatgtaacccaaaaacaattggtgattggcctgcgaaaaaccttcttgagtttttgcgtcatttaactgatggtgacatgttgttgcgtatgaaaggcggtacacctgcatttgtagatagcttaattaaaggcattgatatccatagcggttcggcaattaaaaaagttgagctacaaggtgaaaaagtactggtcgaaaatgaaaaaggtgaccaaggtacatttgaccgcgttattgtggcgacgccaacatctaaacttgaagagttcttaaaccctgaacagtttgcagaagatatgaatctgcttaaacagttccgctttgaacaaggcgacttggttattcatacagatgcaacagtaatgccaccacgccgtaaagactggtcagtgctgagctatatgatggaccgtaagtttactcgtcagcagtttacagtttggatgaatgccgttgagccatcactggtaggtaaaaatcctgtattccaaacttggcgtccagtagttgatattgaccctaaaaaagtcatttcaaaagtgaccttaacgcgtgcagttgtagactcgcaaactattgctttaaacaaagagctacaacaacgtcacttagaaccaaaccgtaaagtattctactgtggttcatggtcatgtgatggtttgccaattttagagtcagcagtgacttctgcgatgcatattgctgaaattttgggtgcacctttaccattcgtgggattaaagcctaaggtcgaagttgcccctgaactcggttactaaaattgtgaaagcaaaagttcgagcagctctttctcgatttatccctcataaatatgcaattgatgcatcaagtttgggggatagtgaagagcttgcttggacaaacttgggtttttggaaaaatacccaaacctaccgtgaagcttgtcgccaattggctgatcatttggcacaagctgtcaatttaaattcaaaagatcacttactcgatttaggttgtgggcagggtgcaagtttattgcactggttacagcactatcatcctaaaagccttagtgcagttgaactacaagcttcatgtgttaataaaattcaaaaacttattcctgaaataagccagattttctgcggttcatttttaaatttaaaacaatttgaatttaaacaacgcttcgatgccattttatgtatcgatgcggcttatcacagtcatttaaattcatttctggattcggttacgccagttttaaattcaaaaggacgattaggttttcattacttgatgcgtgccgactcatgtcacaacatgaccatgctacaagaacaaaagcatcgttatttacttaaagcagccgatgtcacttggaataccttactcacggaagagatactgagaactaccttggaacaacaaggttttacagatattcaaatcgaagatttatcagaacaggtattattaggtttttcacagtatattcaaaatcaacaagcacaaagccataaccgagggttggcaaattttaaaatccaaatgactgcaaagttatgccaacaactctatcaaaatgggtatgtacgttatattcaaataacagcaataaaaaaatagggtgagccatgtcagttaaatatcaaggatcatgtttatgtggagctgtgagctatcaaagtgatgcagagccacgttatagttttaattgccattgtcgagattgccaaaaggcaacaggttcggcctatgcgccaatcgctttttttcatcaatctgaattgaaaataagtggcgaacttaaatattttgagactttaggttcatctggtcgccccattaaaagagccttttgcccgacttgtggttctcaactttttggcttacctgaacttgttcctgaaatgatttcaatacgcgcaggcactttagatgacccaagtctctatcatcctaaagcggaggtttttgtgagtcagacctatgcttgggacatgctgaatccaaaccttaaacactttgaaaaaatgatagagaagagcaagaaataaggcttaattaaagaagccaaatattgccaaagcacagattaaagtaagactgccaagagctaaaaataatatggtttttctaaattttagctgaggcattttacttacaaggataataaggcatgcaagtatgatcactaaagattgaaaaaggtttaaaggtagattagacatctcgttccttgttgtttttaaatttattttagaaataaagtaataaactcattatatctttttcttatttaattgaagaacagaacttgtttataaattcatattttttatttcatgatgggtaaatcaagttttaaatttaaaagaaccatgtacgctttttcctacatccattcaggaaattgacgtctttctatgacctcatgaattgcctatgatgaactcatcaggaacaggaagttccaaaacgtaaaacaacaataataagtttaagcaccaggacgtgaggtattacaggatgtatgcctagtaacgaaatacgaaaaaagcccaacaggatgttgggcttttttcatttcttattaacgaatttctttaccacctaaggcagcacagtcaaaaggtctattccaaaacctacagacaacaaaaaaccccataaatcaaatattcatgaggtttaatgatggtgccggcacacggattcgaactgtggacctactgattacaagtcagttgctctaccaactgagctatgccggcgatgtggagtgaattttacagtttcttaaaaaaaatacaagccaaaaaatgagcatttaaattttttcatatgatttttaaatactcatcgggtttagcctaaaaaagttagggttttactatattaatgtgctttggcatgtgaagtataaaccgctaaaaatattccaattaaagacaagaccacggttaaaccgacaatcgcactccagccaccgtgtaaccagaaccaaccgcccgccgagccgacaatacttgaacccatatagtaaaacagcaagtaaagcgaactggcatgagctttagcttgtttgctttcggcacccacagaactactcgtaagtgagtgggtaataaagaagcctgtggtaataaatgcgatgccaataataatgccgaaaagagaagtgaggagggtcatgagactacccacgatcataagcgcaaagccactcatcatcatggttttcttgccgaagcgatcggctaagctacctgccaacgatgaagacaccataccaaagctatacgacaagaaaataaggctaatttgtgtttgactcagtgaataaggtgcgccgcttaagcggaaggttgcatagttaaacaaggtcacgaacacactggtaagcaagaaaccaatggcaaacaggcgtaataatttagtattgcttaaatgagcacgccacatttgcatgtgaaagcctaaattcagcccttttttctgcacaaaattacgcgaagtaggcagtagttttaaaaatgcaattgagcaaataaaacagattgctccaagtaggcctaaggcggtgcgccatgaaaaatattcaaccaaaatacccataccgacacggcccatcatgccaccaaaggctgtccctgcaatatataaacccatggttttaccgaggtgttcaggtgcaatttcttcggcaatccaagccatagtcactgcgggtacgccaccaagcagtaaaccttctaacgcacgtgctatgagtaaactgtgccagttcggtgtaaacatcgagacaatatttaaaattgcggcacacagcattgacgcaaagatcacgccgcgacggccaatcgcttgtgaaaaggcactcgatagcacaatcgaaatggctaaaaaggcagtcgttaatgacagtgccaaagagctactcgcaggactaatctgaaagctttggctaaatgcaggtaagagtggctgtacacaataaattagagagaagctagcaaaacctacgaggaataaagcaaatcctgcatgtttataagctttagtccctttgtgaatccactcacgggaaagaacagacgttgcctcagtgtttaaggtactgggtgtagatgaagagttcatatcatgaccatgacagaaaaaagagcagtgcctaaaggcatgctgaatcgagaaaattcgataaattaaaattagcaatttagaaggtatttttctaatatatttaataatgggacacgatatgttttatatataacaatggaactcaggcatatacgctactttttggcagtagcagaagaaaaaaactttaccaaagctgcgcagcgcttaaacatgagtcagccgcctttaagcatgcaaatacgagacttagaagaagaactcggtgcagatttatttattcgttcgcctcatggggtggagctgaccgaagctgggcttgcctttttaaatgcaattcagccagtacagcagcgtgtagaagatgcagcaaaccttgttaaacaagtggcaaatggcgaagtgggtcaattacggttaggctttacaggtacttcaatgttgaaccctttaattcctaaatgcgttcgctatttccagcagcaatacccgaaagtaaatttaaagcttgaagaagccaatactttactactcatcgatttattacttgaagaccgtttagatgtcgcaattattcgttcgccacgcaatatgccggacagtcttatacttcaagaattattagctgagccgctcattgctgctttaccttccgagtcttttcaactcgacgatgcatcacacgaaattgatttaactgcgctgcgagagcttgattttattgtctcgccaccttcagtgagtgcagggctttttgatgcgattaaacaggcctgccatgagcgtggctttgaaccgaaaattggacaaaacgccccgcaaattgtgtcaattttatcgttggtgtctgcaaacttaggggtgtctttggttcccgagtcgaccaaacaattgcaaatacaaggtgtggcttatcggtctttgaaagcacctgtccctacggtgggtttagggcttgcttataagaaacatgccccttcacaaatggcgattaactttgccagtgtggtgcaagtggcttgccaccacgccaacgaaataaatgaaatcggctagtttgatttcggcgctctgttcattaaaaagatgcctgaaataataaaaatcgcaccatataaaaacgataaagttggctgttcatgaataaaaacccaagccataagcgctgcaaaaataggttctgaaagctcggtcacttgtacctttgcggcactcatataagacaacgctttggtggtacagaaaaagccgagtatggtcggtagaacagctaaaccaatcaaacctaaaatgatgtcactattaaaattaatgctgtgcaagtttactaaaaacggaactgcaagataaacactaccaaacagcagtaagtatttagtcagaaacagcccgccatttaatttgaactttttcactaaaaccgaaaataagccataacccgtaccggcaatagaggcattaatcagcattaaaaggctattttcacctttccacgaaataatgctaatcccagcaaccgccaataatgttccaataagcgaatgaatgtagatactttcttttaaaatgaatcgaccaaaaaatagggcagagatggcagccgaagccatgagtaccactaccacattggccgcagcgccgtggttataggcaatagtctcaaaaaagaatagcgagaaaattcctaaaaaagcacatatggcaatttgagcaaaaacgctgagtttacttggcgtgctgctaataaaagcaatcttttggctaacaggcactttaaataaaaacacacttaaaaagaaaaaggcgataatggtttttaaaaaggcaatgtcttgcgggtttaaaccactgtgcatgagtaatttactaattacaccaatagatgcatttaaagccgctgcacacagtgcaaatagggttccaataattaaattattcactcttataatttttcctaatttttacgcatgcagtctacattattttttggttgaatattcaattaaaataaccggttaaggttcaatattttcaaaaatttattttgtatggatttaactatttttataaaaacctaaactcttgtaatagacttttgtttcaaataattgtgatttatcgcgccagctcatattatataattagttaattattaaagaattttaaaaatgattaaatcgattattacaggctgcgcggttcttacactttcggctttggcggtgacccatgcagaattttcttatgaacaagaattacaacaaggctgtaataaagtgaagcaatacgcgagcttaggtaagaaattctacgatcaaaaacaatataaaaaagcgctcgaaaatttccagaaccaagcctcttggactgctttttgtaaagccaatgcagacgaaaccacagttaaatttaccgaccgtgatattgaagttgccaacaataacgtgggcttagcctatgccaaattgggtcagccactttgggcaagagcatggtttatgcttgatgaaaaatcaaagtctagtcaatttaaccttaagcagttgcctgcccctaaagcatcaaatgatttgtcgggtgagtacgtccgttactcaggttttggtgagtgggatcacatcacggtaagccgtaaacagggccaatatgccattggctattcgggcgtttatatgggacttagaagcttaatttatggcccaaatatgggtgattttggcactacaatgccgactaatgccaagcaaaccatttataaagatcaagattgccgtattcagctcgattttagaaccaatgcgaagttaggcaattatattcaggtcaaacaaaacgaaggtgagtcgggttgtggctttggacataacgtttatgccgatggaacgtatttaaaagttgagtctggaaaataagattaaacatataggaacacaataatgaaaaatatatttgcacctttactgcttgtttctacagttattttttctgctcacatttatgcagagccgactagtacctgtaaggaagtgaaattccaaaagactgatcaggcttggagtgggcactattatttacatggtgtaatggaagtcggttcagagcttttacttcagccagacggtaagtttcaatggatgcttgctgtaggtgcgttagaccaatatgccgaaggcacatggtggaaaaacggtgactgtattggcttaaaaccagaggctaaatttaaaaaggatttaagtattttccctgaaagcctaacgatttcggataaatccttagatgcaatctgggaaggtggacgccagcaaggcacatatagcaaagactaaataaaaaagtccgacactgagtcggactttttttatgggttgtattttagtgattcaccgcagcaagttgctgagcgttatagcgtgcgcccatgtttgggtatctcgcgataatcgcatcgatttctgccaaatctgccgctgttaaatgaaggtctacagcacccgcattttccacaagtcgctcgattttacgcgtacccggaattggaataatgtcatcaccttgcgccaaaatccaagccaaagccagttgagtggctgtcgcatttttgctttgagcaaattcactaaatgcttgcgccaagctttggttatttttccagttatcgccttggtagcgtggtaactggcgacggaaatcattttcgtctaagttatttacatcaagcgtattggtgattagaccacgcgataacggagaatatggcacaaggctaatacctaactcacgaatggtttgcaaatgggtttgctcaaactcacgggtaagtagcgaatattcatgttgaaccgctgcaatcgggtgaatcgaatgtgctttacgaatggtttcagccgaagcttcactgagtcctaaataacgaactttaccttgtttgaccaagtcagccattgcgccaatggtatcttcaaccggaacatttgggtctatgcggtgtgcataatacaaatcaatcacgtctgtatttaagcgtcttaagctgttttcgaccgcgactttaatccactcaggtgagccgtcgatataagactctaaagaatttttcgggttgaggttatcttctttatagcggaagccaaatttggtcgccaagaacactttgtcacgatgtttttctaaaacttttgagagcaaaacttcatttgcaccgttgccatacatgtcggcagtgtcccaaaagttaatgccgaggtctaaggccttttctagagttgcaatgctttgtgtgtcgtctgaggcaccataggcaaagctcattcccatgcaacctaaaccaagtgctgatactttttcgcctgtttgtcctaaagttctatatttcatttttcacactctttttgcaaaatcacttgagtagaaaaactataaaatgctttggctcaaactgacgtataacattcaaaccaataattataaaattcaaacaatctgtttttaggctacacagtcttcgcggaattttttaggcgaaaaaccggtatttttcttaaagaaattggtgaaatacgctgaatattcaaagcctaagctataagcaatttcggaaatattccaactggtgtgttgtagcagcgctttggcttcttgcgtaatacgcgagctaatatgctcagacgtagttttacctgtggcttcttttacagctcggtttaaatggttcacatgtaccgacaagccataggcatagtcatttgcagttttgagtttaagctgaaaatggggcgagtcgattgggaactggcgctctaataactcaaagaacaaatggcaaatgcgtaccgaagcattactatgtttttcaaactgttgggtcggttgcattttcatggcttcatgcacaatcagatgcaaataatttcttaaaacattgtatttatgaatatagtctgaatttatttcattcatcatctttttgaaaataaatgaaatttcttcaacctgttggtcgtttaaaaaatatagtgggtcgccgtcaactttaaatagcggtgagtcttttaaaaagctttgtcgcgattcttggtttacaaactcttcggtaaatagacaaaaccagcctgcctgttcgggcgaattaatttcccatgcgtagggaaccatcgggtttgaaaacagtaaagcagggcggtcgactcgtatccagcggttggcgtagtgaagttcgcctgtgcctaaaaccagtgaaattttataataatcgcggcggctataaggagtgagaaacgagcaggcatcgcgttggaacacgttgaaatggccaaacgacgtcgatggaaccgagtaatcgctatctctggttaaagaaaagcggcgataaaaatcatgtatggtttccatgtctttgcctgcatgcattatcaatttatttaaagttataaaattcaaactttatttactgtagcttttatttatagcgcgatcaatctgttcatttaaacaggtttgaaaatgaatgataaattaacaatgagaaaaatgagccaatagaaataaaaatattttataaattaataatatatgaacattgacacttaaaaacttgataattattctttgtctgcaaccgattctgcggtagaacgaaaaggggacactttcgggtgtgctggtactgtacccagcctgctaaccccttttcgttttgccatcattttacgatagagcgaaaagggtgacaccttcgggtgtattgggttttcctttgtgtaccatctgctaaccccttttcgttctgtcaccattctacggtagagtgataagaggatactttcaagtgtgctggttctgtatggccagtctgctaacctcttttcgttctgccaccaattttactattatgatgatatcgttaaatttaaattaaaggtccttttagcttaaatatctaattgaataaacaacaataattatttaaccaatttctattcaaccttacattgacacccaaaaacacgcggattatcctttgcctgctggccacattgctagtcgattttgacagatcgatataacacacaagacatcaaaaagttctctttttggtggcgaactcgttcgtcccccttcgtagcggtagggcgagggagggacgccttgtgcgtgctgattcttgtgtgtcagtctgtcaaccttctctcgttctaccaccatcatttgacagtgatcgggtagaactcctttacacacaaggagtccgcacatgcgtactatttcaactctttcattggcaaccttcgccaaaatctttgactctatacccaactggtctttaaaacggtttaaccgactctaggacttaagccataggtcattacgactaaaaaatcatagcaacaataaaatccgagataggcaagcacaccatttttgtgcggcttttgcacgcctgtttttagcgctcaatttaagagcggcggcatttctatctcttttatttacaacaaaaaattattttaaatgatatacatgaaaaatttagaagcttcatttagagcattgcaagtgctccacacggcaaaagatttatttaaccaatatgggtttcataaggtaggggtagaccgaattattgccgactcccaaattcccaaagctaccttttacaactacttccattcaaaagaaagactcattcagatgagcttaacttttcaaacagacgctttaaaagaagaggtattttctacgatctattcataccgtgaactgatggtgttcgataaacttaagagaattttctttttacatgctgactcagacgggctttatcgtttgccttttaaagcaatttttgaaatagaaaagtattatccgtcggcttataaagtggttattgattaccgaaactggcttattcaggaaattcataaactgcttttaaccgtaaaacctgccgctacagttgaagatgcgcatatgtttttgtttgtggtcgatggcgcaatggtgcagcttttaagctcaaatcaaactgatgaaagggaatatctgattgattattttctaagtcgggtttgatggggggggccgacgggagttgggctttagtgtaattaaaaagaaatttataagttttaaatagcaaacagattaaagataaatattttcgccatacgggaggttattatttaattcattaaatttaaatagctctcatctattattgtttgattataaaggttagaaaaaactatttaaggttagacatgaataacttcaaaattcttttcattactataggactaatgttttcaatgagtttatttgctaatccaattttctcagatgacctattaaagagagctacaaatggtgatacatcagctcaactagagttagcagatgtttatatatatggatggggtatcgaagagaatgaaactcaagcggaattctgggcaactaaatcagccgaaagcggtaatgtaaaagcaatgcaatggctcggtgagggatatgccacttatgctggtcttgttggagatatggatccagctgatgcagatgaacactacaaaaaagcttttaagtggttttcgaaaggaactcaactaaatgatgcagattgtatggttggtttggctaacttgtatagtagcggtgacggagttgagcaagatactcataaagcactagaactacgtaaaaaggctgctgctcttggaaataaacaagctatgagggatattgcctttatgtatgaatatggattgggtgtagagaaaaatttagagattgcaaaatattggagtgagaaaggaaagatttaatagatttatattttatatcgagttctattttatttgagaatggaaagacctaaatctctagttttaggtctttaaaaaggaaagtttctaatgaagcataaattaataattattttttcaattatttttgtacttataggttgtggggaagaaatataaaatttctcctgagagtttacctgttgctcatattaatcaagaataccaacaaattattaagatttctggaggaaaagttatagataaatacgctgaattagaaacgaatattccagaaaatctaggcattaccgttaagcctgttgatgacttggatggatataatattatacaaatcaaaggtgttccaaagtacaaaggaaaatatactatccatatacgagctgacttctatgcaggtggtgatgctgaaattgacaagacatatagctttattgtccaagattaaaaattatcgcagagtcgggaaatagcaaagtagagaagttagtaatgacggtaaaatttagacaatatttcttaattttaatttttggattattactttccgcttgtcagccagccgcacaacataatgaaagtttagattcccatcagcaagcctacactttgcatatgggtgaaaaaggtattcaagatttttcaaaatatagtgatagcaatgtcgataattatccagctggcgttagctttagagaacttcaattttctcctcctaacttaggaaaaataactatagagaatggttctaacactttatcgattgaacatgttttctctgttttaggaactcaatatgataaaaatgaagggatccaagttttagatattgatgctggcctcacaaaagaagaatttgctaccccagagcaggtttatcaaagctatgtagctttaatgaaacgtattaatcaggctggttggaaaaactatttctttacagatgctccgcgtattgctaaagaagataatattaagcatctatcgaaaagtcgtgatgtcattgatcctagttatatttttagctttgaggagtggaaaaatataataaacaacagcccaacaaaatcattgggttatagattgtacgctaatgggattattttagatatcagtttaaaaagaacagctaagaataagtgtaatgaagagcaatatatgcttagatttagctttcagagtgttcgatacaatgaaagagactcaattcctgactctgataaaatgacacctagtgaattcgagcaagcgtttaaaaagagattaattgaaaataaaaaatatcgggaaaaggaggagggaaaagctaaggctgagggctatcatatcgatgaaaaatatacagatcctgatgtttggccatatgttaaatagaagtttttaaaataataaaaaggcttaatttacttaaatttaagccttttaaataattctatttttagctttcactcaaaatcaattgtttaatcttcacagctttctcgaagtggtctagcttatgctccataatccatcaatgcgctgcttccataagtagctcagggttatcattcttatttttaaaaaaggcataaaaagatagaccgacattgtctcccttcttttcaattttctcgtcgcatcccttaataaaaatttcttttaattcatgtctcatattgagtatcactttcagcctataaaactaagagttcatattccgctcgccccattggcacatcatatctaataaaggaattaaagactgtcctctttctgaaagacgatactcaacttttggcggaatttgaggatattccttacgaataataagttcgtctctttctaactctttaagtgtattgctcagcgttctaaatgaaatattgccaatacagcgctgcaactcattaaaacgcataacggtttttccatacagccaatacatgatgatcatcttatatttgccattaattaaagaaagagtgtagccaaaacctgtttcttctaatggcgtatttgatggaaggcagtcagtcatttttaaaatctacactatcttttagtatagtatataacaaaaattaccgtacttatatttaggaaagcacacttctataatcgatttatctacttttcgataagagtgtttttataatgaaaaagacattagtgatcgttgcacatcctcacatagaccagtctgtaattaataaaagatgggtagaggagttagaaaaatatcccgaccaatttaccgttcaccagatttatcaagcctacccagatggcgtaattgatgttgccaaagaacaagcgcttgtagaagaacacgaaaatttagtttttcaatttccagtgtattggtttaactgtccaccacttttgaaacaatggcttgatgaagttttggcgtatggttgggcttatggttcaacaggtgacaagcttaaaaataaaaaatttatgttggcggtgtctgcaggtgctcaagaaaaagtttattcagagcaaggtgaatataagctttcgttagagcagatttttagttcttttgaacttactgctttatatgttggggcagtctatcaaccgctttatgcattttatggtttagacacaaacccttcaccagatgatgctattccaactcaccaagaaatagataacagtgccgttcagtatgttcagaaattattagcgttgtctgaataaatttaaagatagaaaggcctaagcgtgagggtttgggtctttccttacaaataaatagtttcagtgtaagatatctttatgatttaaataattattattttttcaattaagcgacaagggaaatttagaggagtaaaattacagcttcacttatagattactaaaaattcagttatgttcagttcagatttaacagattatgtcattcgacaattaggtcggactaaaaataaacgttatgaagcatatgtagttagtcgaattattcatttacttaacgactttactttaaaatttgtcactcaacagtttgttagattatcaaataagaaaattgctttaactgatttctctgtacacgataaaaatagataactcattgaaataatgtcataataattgttttctaacgacgaatactatgacacatctcaatgagttatatcttatcttaaacaaatatctaaaatggaacaagtcacatttaaagtgctttgcgctcatcatgcttgtgattattttaaagcaaacatgtaatctttcttctgcatctaaagccttgcccatcaagtgcttaccacaatcattttatcgacgtatgcagcgcttctttgcaggtcagtattttgattatcgtcaaatttctcagttgattttcaatatgttttcattcgaccaagtgcaactgactttagatagaaccaattggaaatggggaaaacgaaatattaatatcctgatgctcgcaatcgtttatcgtggaatagcgatacctatcctttggacattgcttaataaacgtggaaattcagatacgaaagagcgtattgctttgattcaacgctttatagccatttttggtaaagaccgtattgtgaatgtgttcgcagacagagagtttatcggtgagcagtggtttacatggttaattgaacaagacatcaacttctgcattcgtgttaaaaaaacttcattgtcaccaatcatttaggaaagaatcataaaattagtgatttatttcgccatcttaaagttggtcaaattgaatgtcgtaaacgacggattttggttggtcgggtgaaactatatataagtgcactacagttagaaaatggagagcttttactcgtcgtttctcctcagtttaatgccaatgctattcaggattatgcattacgctgggaaattgaaaccttattcagttgtctcaaaggacgcgggtttaatcttgaaaatacgcgcttgacagaccctagacgagtgaaaaaattgattgcggtgttagctataagcttctgttggtgttacttaacgggtgaatggcaacatgatcaaaaaaaagcgataaaaataaagaagcatggacgactctcaatgagtttatttcgctatggtttagactatgttcaaatggcgattcagcgtttaattggttttgggaaaaaagaagagtttaaggaaattttggcaattttaagaaggcagaaccctgataggataagggttctgtgaaatttgtcgtgtacagagaactgatttatattttcctcaacttggtattcatattgaagttgatgaagggcatcactttttaagaaatagtaaaatggagtattcactcaaccaaatagatgagcctctttatagtatctctcaaacagaaagtgacgctatgagagaagaagatattattagtattactggacataaaatttttcgggtaaatgtttataaaaatcaggaaggtcaacctcaaaatttagagagtatccatcaacaaattgataaaattatagaagaaataaagactgcaaagaataagctaatagaggcttctacatttaaagaatggaatatagaaacagaatataaccctcaaacttatattaatttaggacgcatcagcctagctgacaatgtagtattaaaaacaacaaaagatgtctgtaattgctttggttataactataaaaattatcagagaggaggggctattcatccgtatgaagaagataccttaatttggtttcctagactttatgaaaataaggattggataaatactatatcgcctgatggcttaacaattactgaaaagtcgacagatgaaactattacacttaaaaaattagaagagtggaaaaatggcccacagaaaagaattgtctttgcaagagttaaggataatttgaatagtcgagctatgtatcgttttatgggtttgtataagtttcaaaaagcggatttaaaggatggagcggtatggaaacgggtggaatgtgaagtccaaacgtattctcccaaggaaaccaaatgctaaagcctagaatctttataactatcggattacttcttgctggattaactttatttgcagtccttgaggcatacgagaaaaagactaacgttgaaaaagaacaggcaagtcgagttgctattttcttttttaattcactttctaatggagactcagctacagcatacaaatatgtttggtcaggcgagaacttaaatattcgaaatgctgaaataccccaaatttataaagactcaaaagttctagaagtgctaaaagttcgttacgactcggcaaaaaatagacctgattactatcaacaattttataaaatgatttcacttaccataaagataaaaacagtacatgcagatcttgctggtaaccctgcgggaacctatattgtgtttgtaactgttgtaaaaaaagatccaaaatctaattggctcgttactgagctgggcagtggagcttaattggaataataaaatatttagccaataaaaaagacctaaatcaaaacgattaggtcttttttgaattctggcggtgagagagggattcgaaccctcgatacgcgtaaacgtatacacactttccaggcgtgctccttcagccactcggacacctcaccaaggcgtgcgatagtaactaaaaaaacgagtcctgccaagatttaagacgagctttacagaaaaaaaataatagaggtgataagattgcgctaaaaatcatattggtttaattacacaatgcaaaatacggccaaaaaagcgaccttgcctgccacggctttggcagctcttggagtggtctttggagacatcggaacaagtccgctctatgccttgaaagagtccttccatgcagcgcatgggttgggaattcagcctgaaaacgtattaggaattttatccattattttttggtgcttaatgctgattattagcatcaagtatgtcgcaatcgtgatgcgtgcagacaacaatggcgaaggcggcatcatggccttactcgctttgaatttgcgtaaagcgaaaattgccgacaacaaaaaaatctacatgattgcgataggctttataggggcatcactgttctttggtgacggtattattaccccagccatttcagtattgtctgcagtcgaagggttgtctattgcaaccgatgtgtttgacccgttcattatgcctattgcaattgccattatcgtcacgctgttttttggtgcaaaagcacggtacggcgtttgtaggtaagttttttggtccaattacgcttgtgtggttcttatcgttaggaatcttgggcattcacagtgttatccaaacacctgtggtactaggcatgtttagtccgcattgggcgatccagtttatctatcaccatccgatcatgacattttttgtgatgggtgctgtggtgttaacagtgactggtggtgaagcactgtatgccgatatgggacatttcggaccagttccgattcgtctggcgtggttctttgtggtattgccatgcttggttttaaactacgcaggacagggcgcattattactcagagacccagcggcaattgaaaacccattctatttactggtgccgcagtgggccttgtacccaatgattatcatggcaaccatggcaacagtcattgcctctcaagctgtaatttctggggtgttttctcttgcgcgccaagcgattcaattgggttatttaccacgtttaagtattaagcatacgtctgagtccgaagaaggtcagatttatgtacctttcttaaactggttacttttaatcgcaattattatcttaattttaatcttcaaaactagctcgaacttggcaagtgcatacggtttggccgtaactttgaccatgctctgtgacacgattttggttgctgtatttatctactcggcgtggaagtggagcctgccaaaagtgcttctcctgattattccgttctttattttagagtcggtattggtcggtgcaacttcacttaaaatcttgtctggcggttgggtgccattactgattggtgcgattgcagtgaccattttaatgacatggaaacgtggccgtgagcttacttttgctaagctggaacacgatactttgtcactcgatctgtttgtaaaaagtattggtaatagtgtgcactgggtgccaggcgatgctgtatttatgacaggtacgccaaatgttgtgccacatgccatgctgcataatattaagcacaacaaggtactacatcagcgtaatatcttggtcactgtagtgattgaagatgtaccgtttgttgcacctgaagagcgtattacgacagaaaccttagccgaacatttcttccgtattaaaattttctacggctttaaagatgaaatgaatgtgccgaaagcattgatgcaagcctatgaacaattaggccttgaatatgacttgatgcatatcagcttctttatttcgcgtgatcgtattgttcactcggtgggagacggcatgtcgccatggagagaaaagctgtttatttcaatgcagcgtaataccagcccggtcagtgatttctatcaaattccaaccaaccgtgtggttgaattaggtagtcaaatcgaaatataaaatttgatgtaataaaaaaaccaagacatatgtcttggtttttttatggctcggattattgagcttgtggcataggtgcatctgctggtaacgccccatcttttaccattgggtctgctgattggttcgggttagcagctggcggtggagtgttcggatcttgtggcgctggagccgcttgattcggtgcaggtggcactgcatcagttggtgcagctggaggagccatttcaccgcccgctggaggtgctggtggaacatctgccggaataggagcaccggtaggcgctgcgcttgttggtgcagcagaaacttgctgtacttgtccgctattgaccaaatcgctaatagaacctggttggccgttgacggttgtagtcacttttactttagataagctttctaaagtatcacctggctggactgctggttcagccaaagcagccatactacacaatcctgtgattacgccaataccaataatctttgaatggatcattaaatggactccgattatatttttatccaaatttgtggagctaaccatgtcataagccataagtgcatttcaacgaaagatacgcaattggcgcaattcaatagccaaaggctctcataatgccaacagactgttacgtaaaaccgattagagttacaaaaaagatgaccacgttttaaccatttgaaagataagcgatatacttaaaaaagcaggattgttaagctgcgtgtggacagtggtattgatagaaacatggcaagtaaaaaacgtagtaaaggtacaaattcattttctctaagtgagcattttggcaagattattcttgcttgtattgcagctggaagctttgcaattgctttcggcagtgaaaagatttcgcagtggttttcgcctttaagtactaactcgacttgtcttaaccagttttatcgtgaagttccgcctgctttaaataaagaaagcttaaaaaaagacagctatccgctgtgctttaacggttttaatgttctttattcaggcatttctaaaacaccattatggtcggccgagcatttagatgcagaacgtttaagtgtcaaaattaaacgtgaagataacttccatgaagaaacgcgtgttcctcaaaagcatcgggcacttttaagtgactaccgtggttcagggtatgaccgtggtcatatggcaccgaatggcgatatgccaaataaagaatcacagtctgatagtttctcgctcagcaacatggtgccgcaagcgcctaaaaataaccaagaagtctggcgtaaacttgaagaagcaacccgtgctattgtcaccaagcaaaaacaagatgtatatgtcgtgacaggacctgtttttgagggtaaacgtctcaaaacgattgggcagggtgtgattgtacctaccgcagtttataaagcggtgtatatgccaaaaactggcgctattggggcttattacgcacctaacaataactcgcagcaagtgaaggtagtgagtgtttgttatatagaagaaaagcttggtattaacttatttccacaacttacagaacagcaaaaacgtaacgtttatcgcttaccgttaactgctagccaagttaaacctaaccaaaagctcgactatttgcattgggatggtgaaagccagtgcgaacaagacctaagcgcagaacaaattcaagcgttacaagaccaatttaaaaagcaaaaaactggctcttctgaaccgatggaagcaaaagttccaagtattgatgaagaaactagaaatgccattgtgaaacaattggttgaagccttggtgaactatttcttgcagataatgaaataagccccttctagcactgttgtgaagcctgaatcgatacaataagatgaatagacagatctgtctgttcatctgtttattcgaataaggataataataatgtttgcctcgatgtttcttttttcctttgcaatgtcgattacacccggtcccgtcaatacagtcattttatcgaccagcttaaatcatggtttaaaaagatcacttccctatatttcaggtgccaccattggctttaccttgcttttgatttttatggcctttggccttcaaagtgtattaactcagtttccagttgtcttaaaaattcttgcagtttgtggaacgctctttgtttgctatatcggcataaaaattattctttctgctgccaatatttcaatttcaagtgcacctgtagagcacatgcttattcccaattttaaagatggtttcttattacagtggcttaacccaaaagcgtggttggcttgtgtgtcgggcattaccatgtttacgagcattgaaaacccgcagtcgttgccgatctttattattatttatttcttcacctgctatgcctgcttgttcttttggggactatgtggcgataaattttcagtggtactgaatcagggcaaccgtttgaaatattttaatatcctgatgggcgctttcttaattttgtcggctcttttaattttgattgattttttttaaattggtcgtattacactgtgaagatataacaacgagacaacagctatgtttaagccatttgaaaagggtactgaatcttcttcaattgaagatttaacattagaaaatgatgtcgaatgcgtgagcatttatggcaatttgcaaatcactaaagacaaagtcgggttagagcaggcaaaggcattgcagagttttttaaacgatataattgcagctttggaaaaagaagaattgcctgagaaaattgaacgtccggctgaacaagaaattaataatccgtttttgtaataaatatattttactcaatttgctatcgcgacggcggcacggaggccgcctgtttcactgcgttacatggaggtaacgtcagtgaaacgaatgagttttgtcacttttgctcactcaaaagtgaggcattacctatataactacaacttgagtgaccgtggtgtttgcggttgtgcagttaatccttatccccagcaaccaccttataaataattgccccaatcacagcccctaaaatcggtgctacccagaacaaccacaactgacttaaagcagccgtttcagcaaagaacgcaacacctgtactacgtgcagggtttaccgaagtatttgtcaccggaatactgattaagtgaatgagtgttaagcccaaaccaattgcaataggagcgaagccagcaggtgcacggcggtcagttgctcctaaaataatgattaagaagaaagcagtaagaaccacttcaataatgaaagcagaacctaaaccaaatttatttggtgataagtcaccaaaaccattggttgcaaacccgccaacaccactaaagcctgcttggccttgagcaataatataaagaacaaatgcagcagcagtcgcaccaaccacttgcgcaacaatatacggaattaaatctttaacatcgaagcggccaccgacccaaaggccaacacttaccgcgggattgaaatgtccacctgagatatgccctagagcataagcacctgtgagtacggttaaaccaaaggcaagggctacacctgcaaagccaataccaagttcagggaaagctgcggctaaaactgcgctaccacaaccaccaaagactagccaaaacgtacctaggaattcagcaaaatatttattcattgtgattactcatctattgatctattttttaattaatgtgaaatacgtcacaaaaaattaagcatgtgactatatgaaatttttgttttcagtgttgttttaatcaagaaaagatttgtaagttttggttggttattctttgtttaaaaattgatctctccactgttgtggggtttgcttggtccaatgcttaaatgctctttgaaatgcgctttgttctgaataacaaagtaaaagtgcaatctcttgtaggctcaaatgcgggtcttttaaatattcggttgccaacataaagcgtacttgctgaacacgttcctgaaaggtggtgttctgctgttgtaagtgcctttggagttgacgaaccgataggcctaattgagctgcaatatattcaatttgatactgattcttttgcagaccagtcaaaattgaatgctgcaaacgctgatcgagttgggttgaattgggtaactgttctaaaagtgcttgggcctgctgaaccaatagttgctgtaatgtgtggtctgcgctgctaagcggcttgtgaatttcggtaatgggtataaataactctgtacggggctggctaaaacgaacgggacattgaaagtactgctcgtaaactctgatatttttaggggctgcatttaaaaagcgcacttcatataactgtacatcttcgtgagacataaaaagacgtaagaactgaatcaccagtgcaatcgcgatttcatcggtaagctgggtagggtgtagctcagtcgcttcccagcgaatagaaccatatctcccttgtagctcaaccactaatgggctcccgtcataaattagacggtgaaagtcatggtaacgaattaaggcttcacctaagttatcgcaagagagagcaaggtaggcaataatgcctaaatgtttgggttgtacatatttggcaatttctagccctaaccccggctttgggtccagtttataaataacttctaataggtcacgccaaaccacatagtcaaagcgttccagattttggatttgttctaattgttcaggaatagttaactcattggcttcgcaataagcctttaataagtgccccagtcctccatataccgagcctgtataattttttagttgtggcatccctaaccacctcttttttgtcgtgatttgtcaatgaaaccataaattctggtcaatacctagcataacgaattttatatgctgaataaaaagaaaaaggagttaggtgatgttaaaagggtttattgccggaattgcagttgcgaatgcatttgaatgggtagcacacaaatatattttgcatggtgtacaccgtgccggacaaccgcgctatagcccagtgccgaaaagtatggagtcgcattgggcacaccatcgtgaagtccgtaaacaacagtttcatgatgattgttatgttgagggcgttggaaactggcgaaccaaaaatgagttaatttcacttgccgtggtggcaaccgtttcaagtgcaattttctaccccttttcaaaaggtatggcacttgcagcttggtacagtgctggtaattattattatattcatcgccgtgcacatttagagcctgactgggcaaagcgtaaaattccgtggcattacgaccaccatatgaactctaaccaagatgccaattggtgtgtgaccaaaccttggtttgactatgtgatgggaacacgtgtggtgtcttcggcagatttaaaagaacaaaatcctttggggatacggttacctactgcgcttgctaggccactctctcaagctgtagaaaaaatctttccagcaaaatgggtcgagaaaaaagcacagcctaaactcgttagtgatgtaaatgcgatagaaggtgctgcataaaaaattaaaggggcatcttgcccctttaaatataaataaacttacaagcgcatttcgataccttgttcagccaaatattgtttagcttctggaatcgtatattggccaaagtggaaaatacttgctgccaatacggcatctgcaccaccttgtaaaataccgtctgcaaggtgttgtaagttacctacaccgcctgaggcaatcgttgggatggtaacgcggtcattaatagcacgcattaacgcaatgtcataacctgctttagtaccatcggcatccatactggtaatgagtaactcaccggcaccgtagtcagccatttttacagcccattcaatggcatcaatacccgttggtttacggccaccgtgagtaaagatttcccatttgttgtcaccagtttttttggcatcaatcgcaaccacaatacattgtgcgccaaaatgctgagaggcttcttgaacaaattcagggttaaatacggcagccgagttaatactcactttatctgcacctgcatttaataacgcacgaatatcttcaaccttacgtacaccaccaccgacagttaaaggcacgaatacagtctcggccatacgttcaacagtacggtaagtggtatcgcggccatgatgtgtagcggtaatgtctaagaaagtaatttcgtctgcaccttgttcgttatagcgacgtgccacttcaacagggtcgcctgcatcacgaatatcgaggaattgaacgcctttaactacgcgtccgttatcaacgtctaggcaaggaataatacgtttagcaagcatagctttttccaaaaataatcgccgttggtgaaagttcctacacaggcgctacaccttcatggagggaagaggtattctatcaaacttcacagatgttttttgcaggttttccatgtcggtttataccccgttgagtttagatgaagttcgcacctttgctgcaccttatggattagaggtgttggagctgaacccaattcagggaggtattcaaaacaccaattattttctggttgatgtaaaccgcaaacaatatgtacttaccgtatttgaagagttagatgcacaaggtgcaggcgaactaattccggtgcttgagcagttaggtactcatgatgtacccgttgccgtgccattaaagcacagcggccaagcggttcattttattgcgggtaagcctgcacaaattgcaccacgtttaatgggacaccatcccatgcaaactacagtagcccaagttgctgcaattgcagatgcacaggcgaagctacatgtagctttacaagattttccgcttgaacgcgaatatcgccgtgatcatcaatactggacaggtgttgctgagcagcttaaaccaaatatgactcaagatgaccaaacgttacttgagcaggtttatcaagcttttaatgcgaaaacagcgcagtattcaaatcgaccgacaggttttattcactcagatttgttccgtgacaatactttgtttgaaggcgagcaactacaaggtattttagatttttacgagttaaatcaagatgagttgctgtttgatattgcgattaccatcaatgatttttgtaccgaatatccagcagcgcatttaaactcagacaaagtagacgcttatttagaggcataccaaaaagtccgtgcgctgacttcagatgaacttgaatgtttagatgtattcttggcaatggcggcttgccgtttttggtcaatgcgtttgcaagttgctcaaaaaaataaagaagaaggacgtaccggcgatgacatcttgcaaaaagacccgcaagaaatgcgagcaatgatgcaagaccgtttaagccatgtaaaatcataaaagggaataaagatgcgagatcaggggcgtttagtcgaatggttcgacgaaaagggttatggctttattcagccggatgatgctgaaaaagagcgagtctttttgcatatcaaagattttgcacgccccggacctcggccaattattggttgtgcactggaatatctggtaatcctcgacgaacgaggccgttttcgtgctcagcaggtcacgtatttaaaggcatctcaaacccgtaaggctttaaaacctacaaaaacacaatcttcttttcagaccagcccatggtctgctatgcaaatggggattgtgttttatttcgttttaatgggcattatgagttttattcatattttgccggcttataccttattgtttgtcttaatgatgaatgtgttgagttactggctatattcacaagataaagaagcagcgcaattgggtaatcgccgtgttcctgagcagactttgcacattgtcagtttcttagggggatggccagctgcgtggtgggcacaacaaaaactgagacataaaacacaaaaacaaccatttcgtaagatttatttttgtaccatattctttcatttacttttgattttgtggctaatttctcctttaaacgttttgcggggatcataaaagtaaattgttttattaaacttgagaggtataaaaatgaatagttctatcgaccaagatccaaatcgtactttaacacttatcttatatgtactttatattgttgccatttttacaggcggcttacttgcgattattgctttaattattaactatgtaaaacgctctgatgtgcaaggttcaatttttgcgagccactttacatggcaaatcagaacattctggtggtacttggcttggaatattattgcctttttgccgtttattttcttgttctttacgggtgaaaataccgatctatttgcaggcgttgctatttcatcgactgtattctgtgtgggtgttatcgcggcagcatggatctggattgtatatcgtgcaattcgcggtttgattgcgttaaatgataaccgaccgatgtattaataaatcatgattattgaacatgtgcatttgaaaataaaatcgggacaaagtgaagcatttcttaaggcattcgagcaggctaaacatattgtttctctaatggaaggtttcaatgcggtccaactgattaagcatacaaccgatccccatcattatattttaatgattttctgggatgaaattgaaaatcatacagaagggtttagaaagtcggaggcttatcaagaatggaaaaaattgcttcatccattttatgatccaatgccgacagttgagtactacgaaccctctattttattaaagaaaagtgatatataaaaaagagagcgttaagctctcttttttattctcggactcttttgtttttcttaataggcagcttaatttttaactcactgactaaaacacctaacaccactaaagcccccccaaaaagggcaataactggtaaacgctcacctgcaattcgaccaataatacctgcccaaacaggttctcctgcatagataattgcagcacgcgaagggtcaaccacacgttgagcccagttcattacaaattgaatgagtgcacttgctaagcctaatgcgacagcaatgagtattagaggccatgaaaatgctggaattgtatgttcacctactataggcataatggtaaacgaaagtagagaggcgacaccaagttgaataatggtgacgcgacgcaaatttacctttccagcaaagtagctaataaaaataatttctaaggcaatcgcaaaggcgccgagcactgttaaaagctgtccaaaactcaaggaaatttgcttaaaaccattacccgtcaataaaacaaggccagtaaaagcaagagctgctcccacccaagtcatgatatgtggagtttttctaaatatgagccacattaaaataggaacaagcggaacatacagcgccgttaaaaaagctgattcactactcggaatagtttgcaggccaattgtctgcgtgccatagccagctgcaatgacaaggccaattacactgccagcgcccaagtcttttaatgtaacgcctttcatgctctttaatgaaataagtaatagcgttaaggcagctacggcaaaacggcagcctacaaaaaacataggtgatgaaaaattcagtgcgtactgcacagtaagaaatgttccaccccaaatgaccgtaatcaaaatgagagctaattgaggaactttgcttgaactcagataagttggtgacatactcaaactaaagggaattgtgcaatatactgcacatattgcgctattcttctgttttgtgcaatatattgctcaaattttctttattcatctattttatgagccagtcgagtagcgttttacaacatgtaggcacaaatatccgttcattaagagatgagcgtagtttaagccaacaggacttggctgatcgggcaggtgtaagtagacgtaccattgctgctctggaaacaggccaagtcaatattagcttagctaaactcgatgcgattgcggcagtgttgggagtagattttagaacaattgtgagtgcgcctgagctaaaagaacatgccctagtaaatgcactcgcttggcaaggtgaaaaggaagaaagtaaggcaacttttcttgcttcagttccttcccgttctcaagttgaactttggacatggtctttggctgttggggagtcttatgttgctgaagccgatgctgaaggatggcaagaactgatttatgtgttagaaggcgaattgaccatacaatttacagacagctcaaaaaccatagcggctggttcatcttttatttttgccagttcagtgacttatacctatatcaatagcggtagccaagtacttaaatttattcgtaatgtggtgtattgattcggaatatattttcatatcagcaataaaaaagagcctaatcaggctcttttttacatcttaaaaaattaaagacggttttcatctaacaaaagctgagcttcacgaaggtttaaagtaccttcataaattgcacggcctgtgattgcacctaaaatgcccggttggccttttaagttacgaacgtcatcaaggttggttacaccacctgaagcaatgactggtaagcctgagtattgagccaagtttacagtttgctcaacatttacaccttgcatcatgccgtcacgcgcaatgtctgtgtaaacaatgctagacacgcctgcatctgcaaagcgttttgctaaatcagttgctttcacatcagtaacgtttgcccaaccgtcagttgcaaccatgccattcatggcatcaataccgacaatgatgtggcctgcaaaacgtttacaagcttcttctacaaattcaggctcttgaacggctttagtaccgataatgacaaaagtcacgccagcttctaaatagtgttcaatggtttctaatgagcggataccgccaccaatttgaattggtaattctggctgagcttttgcaattgcttcaacaacaggtttatgaataggcgtacctgcgaaagcaccattcaaatcgaccaaatgcaaacgtcgtgcgccttcatttacccaatgctgggcagttgcaaccggatcgtcagagaaaacggtatcgtcttccatacgcccttgttttaaacgcacacatttaccatctttcaggtcaattgctggaatgattagcatgctttcgctccttgcttcatcatgtttatgaaattgtgcacatcttagcaaagtattgatcaatcgctaagccttagaaaagacttttataactttacctttgaagtgcggtttgaatcttttcagaaatatgtatcggtaatacttttctttttttaagctcgagaaataccaatagggcagcataggcgtcagcagctgcataactgatttgttgtgaagtaagcggttttcgcgcccaatttgaagttccgactttcttcgacttggcaagatactgaccaagtaatagtgctacggctttttgtacacccatttgttgtttaaaaccaaagtggctaaaacctttagcaaggtcaacgcagctttcaagctctatgccttttttgtgaaaaatatgcttatcatttttaagcccaaacccgactttaatttgttttggattagacaaaatgggctgtaaaaattttaaagtcgataaattgacatgaaataaataggctttgtgttctgtagccagctgaatcaaatgtgggccagttgatacttcacctacctgaaaagtaggtttagattcagaatcaaatcctaaaaaggtcgctgcttttaattcttcttcaatagttttgcattgctcgccattttcaatcaccacaatattttgatggttaagattttcaaaaggagggagctgctgaatagaagttttatcaagaagggcagaggcttcagacatatttaacagcgtacaaatgaatagggctattcactttatatatgaataaagcctagagaactaggctttatgtacatctttaaaaattattcagactgagatgggctaccaattacaatactttcgcttttctcgacatagccttcataggttggagccataattacggcaataacaccaaaaattaatgcaagcggaataagcacaatataaatccagcctaaaacacgctcccagcttggcgttggacgcttaggtccataatcattaggaccttcagttccttttgcacagaataaataaatggcaaggccaatattcacgaccggtactagcatcagtaaagagagccaccctgtattattgcggtcatgcaaacggcggatggtaaatacgaagttaatataaataccgactatataaagaattgctatacagattaagccaggcgtagaaaagtctggggcaccttcagggtttgtaaaaccaaaagtaaacataataagtagaatggcggtaacaaggactagcgtaaataagaatgtccaagctgcataagagagtcgtccaaaacgaccatttgccttaaacggtgaatcttgtgaaatgggctgattttcaaaaggtgaattcattgtgtttatcctaatcatttgattttatttaaaagtatgaatattcaatattttgttgaataaaatatcattctataaatgattggttattattataaataaaaaaacagatcaggctatcttgacctgatctgttttagtttttgaatcgaattaaatattccattccacaaagtttttcagtaactgcaaaccagcagtgtgacttttctctgggtggaattgagtcgcgaataaattatctttgtgaattgctgtgcagaagttcacgccatactcacatgtagcagccacaagattttcatctttaggttcaacatagtagctgtgtacaaagtagaagcgggcatcttgttcaatgttgttccacatcgggtgacttgggtccatttggtgaacctgattccaacccatgtgtgggacttttaaaccttccatttgaggaaagtgttttactaccccgtcaaaaatacctaaggcatctacaccgccgttttcttctgagctttgtagtagtgcctgcatgcctacgcaaattgcaagaacaggcttattaaaagctgctttacgtacaacttcatcaatacctgcttcacgcatgccttgcatacagtcacgcattgccccaacacccgggaaaacaattttgtcggcttgtgcaattaattttggatcatttgtcacatcgacggttgcacctacatattcaagtgctttagcggctgagtgcagattacccatgccataatcaagcaatgcgatacgtgtcattagaggctaccttttgtcgatgcaatcgtgttttcagcacgtggatcaatttcacatgccatacgtaaagcacgagctagtgctttaaatacactctcgatttgatggtggctatttttacctttcaagttatcgatgtgtaaggtcataagcgcatggtttacgaaaccttggaaaaactcggaaaataaatctacgtcaaaggtaccgatgcgcgcgcgagtaaatggaatatccataaataaacccggacgtccagacaaatctacaaccacacgagataaagcttcgtctaatggcgcgtaaaaatgcccataacgacgtaaaccttttttatcacctaaagcttgtgcaaaagcttgtccaagcgtgataccgcagtcttctacggtatggtgatcgtcaatctctaagtctccatcacaatgaatatcgatatcaaataagccatgtcgcttgatttgatcaatcatatggtctaaaaatggaactccggtgtttagtgtgccttgaccagtaccatcgagatttaaacgaactcgaattttggtttcattggtatttctaaccacttcactgatacgttgcgtcatggacacgttcctcaaaaaacgtcaaaaatgattggatgttaacgacaatttcgctgtgacgaattcgtgacagcatcatagtttgctcaggagggttaatcaatgcctattaccgtacatgcttatagttctctagataattcagagatccgcgatcagcttgagcgactgtatgacacaagtccggagtttggtgacgggcacgatgcgattgaacaacttgaacaagatttacaacagtataccacgctatacactgccgaatttaacaccaaaattataggtgcaatctggtgttcaggacaaggtgaaagcaaggtgcttgaatatatagttgtacaccctgcaaatcgtggacgcggagtagcagagcgtctagttgaagaagcttgtcgtatagaagaagcaaaaggcgttaaaatttttgagccaggttgtggtgcaattcatcgctgcttagctcatattggtaaattgcatagctaaaatcctatttttacggcacttgtgatttaaaattaaacacttgttacaaaaaatgcggaagttgcttgacgtcctcctataaacattgtttaatacgcccacttcggcgtgatagctcagttggtagagcaacggattgaaaatccgtgtgtccccagttcgatcctgggtctcgccaccattatttgtgttttcaatccctgatcccatcagggattttttttgagtataaaaaatactcatttaaatcaaaaactcaggataattgttgactattgttctgagatacggcttaatacaggccatcggcgtgatagctcagttggtagagcaacggattgaaaatccgtgtgtccccagttcgatcctgggtctcgccaccatattcgaaaaagccccatacttaaagtatggggcttttttcatgcctatttatttgattcgtgattagaatgacttcacctgtgtataactctcattttatccacaagtaaagtgagttatcccaaggtctagctttatttcctaaaggttcttcatttcaagaggcgcctttagtcatgagagttgtcactaataagacgttttcctaaacataccgcttctacttcgtcatagccgagctgctcgtaaaaattcaacacattcagattatctttacgtactaataattgtaatttgggacagccacgcgccataagccgcttctcaagctgttgaacaagcgctgtggctattcctaagcgttgttggtggggatgaacagccagataattaatccagcctctatggccgtcgtagccgcccataagcgtaccaattagttgctcatccttaatagcaacgaggaataaatcatcctgctgcgaaactttcctgaaaatatccgtttcagggttattccaggggcgagttaggccacagctttcccataaattgaccacatcatccagatctgcatttgtaaattggcgaataatgaacatatggatttctactttttgttttgatgtattgaaaagataaaataaaaattcgaacttgagcagtagtttgtgaataatttacacaaataaaaaagcacccctgtaggagtgcttaaattaaaagtatgacttaagctgattttgcaactggtgttggttgaagcatttggcctgtttcttcgaagtttgcatgccaagacaatgcttcacgaagtaagtgaggtgtatgtccgcctttagcacatgcacgatcaaagtagtcatttaatgcatcacggtaaagcgggtgtacgcagttgtcgataatagcgcgagcgcgttcacgaggtgctaaaccacgtaagtctgctaaaccttgctctgtcactaaaatatcaacgtcgtgttcactgtggtcaacgtggctcaccattggcacgatagaagaaatatctccgcctttagcaatagatttggttacaaagattgccaagtgcgcattacgagcgaagtcacctgaaccaccaataccgttcatcattttagtaccgcacacgtgagttgagttcacgttaccgtaaatatcaaactcaagtgcagtattaataccgataatacctaaacgacgtacaagctcagggtgattagaaatttcttgtggacgaagcactaatttgtctttgtaagcttcgatattgccaaaaactttttcaccgcattttgctgaaagcgtaattgaactaccagaagcaaatttcattttgcctgcatcaattaattcaaaagtacagtcttgtagtacttctgagtacatgatgaggtcttcaaaattagaatcttttaaacctgttagtacagcgtttgcaattgaaccgatccctgcttggagtggaccaaggtttttcggtaaacgaccttcagccacttctttttcaaagaatgcgataaggtgattggcaatgccttgagtctcatcatctggtggagtgactgtcgatggagagtcatgtgtatcgttaaagacaataccaacaattttcgaaggatcgatttggatagctgttgtaccaatacgttcgtccacttttgttaatggaattggtgtgcgtgttggacggtaagttggaatatagatatcgtgcaaaccttcaaagctttcgcttaaagaagtgttgatttcaacaattactttttcggcaaaaatcgcaaaacttgcagagttaccaacagaagttgttggaataatgccaccatcttcagtaatcgcaattgcttcaatgaccgcaacatctggacgtttaagttgctggttacgcatttgctcaacagtttctgacaagtgttggtcaataaacatgacttcgccgttgttaattgcgcggcgcaaagtgttatccacttggaatggcatgcgacgagataaaacacctgcttccgtgagttgtttgtctaagtcattacctaagctagcacccgtaattaacgtgatttttaacggattcttttttgcaagctctacaagtgcttgtggaacagctttagcttcaccggcacgagtaaaaccactcataccaacggtcattccattttcgatgaattgcgcagcttgttcagcactgatgaccttgtcatgaagagaagctaggcgaatacgacttaaagacattggacatcctcaatattgtcaaaacataccggattttagctatgaaaaaatgaaaagtgcataggtgttaggctaaggtctaattttttaaataaatgcgggtataacttatttttatgatttttaatatattgattattattgtcttttttgaggtttaaaatagcgctttaaatgttcaattgctcaaattaaaagcgctcacttaaagtttgtttgattttttctaaaggattatgcgttgtattttcttcaggggcgggttttggaattggtaaagaaataattacctctaaaccgccttgttcacgattgtgaatctggatttcaccttggtgaatatcgacaatacgtttaacaatggcaagacccaaaccgcttccctgaatcgttctagccgagttgcctcttacaaaaggctgcattaattcttcaatttgatcttctggaatgccttcaccatggtcagcaaccgtaattaaaatatgttcattttcaacctttgcactgagttcgatcggttcagcaccataacgctttgcgttattaatgaggttggcaataagtcgttttaaagagaggctgcgtgcaggaataatcggaacatcctgcatgttaaagcgaatatcaaggggtttaaactgaaccaccaattcttgtaaaagaatattgatattagtgtcttttaattcctcatctgaaccatcgcgcatatatgagatgaactgatttagaatcgcatccatatcatctacgtcataaaccagaccttcacgtagaaactcatcaggtagcatttctgcagttaaacgaatacgtgtgaggggagtccttaaatcatgtgaaattcccgctagcatgattcgtctttcacgctcagtttgttcaagcgtatataccatacggttaaatgcttggtttacttggcgaatttctaaagggccatggttagtatctaaataaggtgcagttccagacttactgtattcgttggcagcattttgcaaacgacgtaatggtcggttcatttgtcgaaccaaaattaaaatgatgatggccgaaactaatgggacacccacaacccagcctaccagtagctcggggctatagttggcataggtttttaaaggttcacgaacccagttaccatgcatttctggcgtttgaatccaaatacgtgggctaggtttaaattggaaatagacagtaacgtcttttgcgccaatttcatttgccagtttttgctcaacttggttggtaaaaaactcggcaataattttatcgcgaacacttggatattctttggggttcgtgacatattcaatgccaacccgattgcgtaaccatgtgtcgacgtcaacttcgctatcgcgatgaaaaatacgaatattagggttatttaccagttctagttcaactgctagatagcgcgcatgttgctgaatttcaggtaaatagagggttcgccaaaaaaaccacaatgacataaataagctaaagagtaccaccagcagtaccaaaattgtggtacgcatggccgcagaacgtggcttaatcttgtcgagaaaacgttcccatcgggtccgtttacgctctgagtacgcaacgtagtcggtaaaggtttgcggtggtattggctctaaactcactctattttatctcaagcttattcagcaccatccggaacaaacacatagcctacgccccatacagtttgaatgtaacgtgcgcgtgccgggttatcttcaattaagcggcgtagacgagacacttgaacatcaatagaacgttccattgcaccccattcacggccacgagccaagttcatgagcttgtcgcgtgttaaaggttcacgtggatgctgtaccaaagcttttaatacggcaaattcacctgtagtcaatgtaacgatttgaccctcacgagtcagtgtacgtgtagataaatctagagaccatggaccgaagctaaccacttcaacttgttggcttggcgcacccggaacttcacgtacctgacgacgcaatactgcgcgaatacgcgctaaaagttcatttgggttaaatggttttggtaaatagtcatctgcgccggcttcaagaccagcaatacggtcagagtcactaccacgtgcagttaacatgataattggagtatcaatatttgactgacgtaaacgacgacaaatacttaaaccatcttcaacgggcaacataaagtcgagcacgataagtgaaaataactcacgttgtaataaacgatccatttgtgaggcatcatgggcagtttttacaacaaagcctttatcttccaaaaaacgttgcaagagggtacgtaaacgcacatcgtcatcgaccactaaaatgcgctcgacacgatccgtttcgttatgtacggtttcaggatgttcagcaggtacaactaaactcatgatgtactcccttttaaagtcataatttatatattattggatcggttaggcttattgccaacaagccctcagtataatgccgatgttcttgttaagactatgtatcaatttgctcaaaattacaattttcgtaggggcttgaaaccaaaaaacaacatcttatgcccataatttagcaaagccttaaagaaaaactcaaatatttgactatttacctctttcttatcgagtaaattctaataaatatttgtttcaaataaattattttaaaaatgagtttcggtttttaagttctaacttttaatttattcattcacggtttaagtatgaagacttaataatttatttagaaagataagaaaaactatattttgatcgttctggcaatgtatcaatatgttctttttctcataatttatattaaaaattttctttaattaaagaagtatctataaatttcatattttttaaaaggtaaaaggctagcttaaaggcccaaatgagtcacagaaaaaacttttttacggccataagaatgtgaaaaattcatagtcaatacaaaaaaacgttttgaatacgcaaacaagtgtggattttatggtcttggtctttataatcagtgcttttaaactttatccttgtgggatcaaacacgatgactgacttagttcagcagttggcaagtgagcttgccgtacgtccaaaccaagtagaagctgccatccgcttaattgatgaaggtgccagtgttccattcattgcccgttaccgtaaagaagtaacacaaggtttagatgatacgcagttacgccaattagatactcgtttagcgtatttacgtgatttatatgagcgccgtgaaaaggtcattcagtcattgcaagaacagaataaattgaatgatgacttgttggcgcgggtgaatgcagccgaaacaaaaaatgctttagaagaaatttatgcgccgtaccgtcctaaacgtacgagcaaatctttcaaggcgaaagaagcgggccttggaccaattgccgaaaaaattatttcagaacaaattgatccgacagaagcattggctggttttagtcatgaagactatccggacgttgaaagtcaattagacgcaatccagcatattctgattgatgactgggcacaaaacattcctcttactacagaattaaaagcaacttttgcaaaaacagcagtattaaaaagtactgttgcatctgaagagaagaaagaagtgggcaaaaagttccgcgattactttgaattctcggaaggcctaaacaaattaccatcacatcgtttattggcgatgttacgtggccgccaagaaaacgtacttggtttaaaagttgatggcgaagatgatgcaccattggctcgtattgaaactgaatacaaccttgatcaggttcagccacaaacacgtcaagatttcttaaaacaaactgcaaaattattttggttaggtaaagttcgtcctcaaatcgagcattcattacttacagaaaaacgtcttgctgctgaagcagaagcaatgcaggtgtttgctgaaaatcttcgtcacttattgttatcagcgccagctggtagccgtacgactttgggtgttgaccctggtattcgtactggtgtgaaactagccgtagtaagcgaagctggtgatgtacttgcacatagcacgatttatccatttgcgcctaaagaagataaagaaggttcaattgctgaacttgcacgtctatgccgtgaatacaatgtcgagcttattgctattggcaatggtactgcaagccgtgaaacagaagctgttgtagctgaaatgatggctgcaaatacagatcttaaattaactcgtgtaactgtaagcgaagcaggtgcctctgtttactctgcaagtgaacttgctgcggcggaacttccagagcttgatgtttcaatccgtggggcagtttctattgcgcgccgtttacaagacccgttggctgagcttgttaaaattgatccgaagtcgattggcgtaggtcaatatcaacacgatgtgaaccaaactggtttagcaaaaacgcttgatgcggttgtagaagactgtgtgaatgctgtcggggtagatgtaaatactgcttcaccagcaatcttggcttatattgcaggtttaaacaaagcaattgcacagcaaattgttgaataccgtaaagagcatggccgttttgacacacgtcaggcacttaaaaatgtaccgcgtcttggcgaacgtacttttgaacaggcagctggtttcttgcgtatccaaaatggttcagagccattagatgcatctgctgttcaccctgaaagttatggtcttgttgagaaaattgttgcagcaaaagcgacaacggtaaaagacattattggtaataccgaaattattcgtcaggtaaaagcagaagagtttgttgatgacaaattcggtttgccaaccattcaagacgttttagcagaacttgaaaaaccgggccgtgaccctcgtccagaattccgcacagctaaattccgtgaagacattactgaagttgctcagttgactgaaggtatgcagcttgaaggtgttgtgacgaacgtgacgaattttggtgcttttgttgatattggtgtgcatcaagatggtttggttcatatctctgaattagccaatgagttcgtttctgacccgcataaagtggtaaaaccaggtcagatcgtacaagtgcgtgttatgcaggttgatgttgaacgtaaccgtgtgaacttgagtatgcgtgcagaaggtgcggcacctgtgaaagcacagcgaccaccacgtcgtgaacaaaataacgaacagcgttctgagcgtaaaccacaaggtaaacgtccacaaccgcgtaaagatcaagttgaacgtccgcagcgtagtaagcaagaaaaaccacaagagcaaaaaattggtggttttggtgcattattattgcaagcaggaattaagggttctaaataagagcctttagagaacttaaaaaagcctcctaaacgggaggcttttttattgtttctaaatcatcttctaaatggctagcgctatgttttattaaaacatcacgctcataaagatgaggtgaatcttaagatcaacaaaaacgtcgtgaaatctacaatcaactatacaacgttatagcataactcaactttaacccgattcagttgtcagacaatatcgataaagccttgaagtaagttcctcactttcaggcagttacattaaaaattgattgtttttttatattataaatggttgtttttatgccggctttagaactgaaaaatagatttcacgtaaacgacctcctttcgggagttgtcgtatttctcgtggccttacccttatgtttgggtattgccttagcctcaggtgctccaattatttctggcattattgctggaatagtgggtggaattattgttggcctgctgagtggctctcacatcagcgtttctggcccagcagcagggttgactgcggtcatccttgtacaactcgatcaattaggcggcaattatgccgcctttttattgtgtattgtatttgcaggaattttacaaattctgtttggtgtatttaagttgggtttctttgccaactttattccaaacaatgtcattttaggattattggcagccattggtgccattttgattgtgacacagttaccttatttatttgggttgactgatttttcatggaaagaagtttggactgctactccggatacgtttatccaaaaatttgatgctggagcagcattgattgggctgctgagcttatttttaattttagcttgggacagtagcccacttaaaaagttagcgttgccttctgccttaattgccgtggtactcgcagcagtttttaactttgttttaataagtatcggttcttcatgggctgtgcaaagtaataatttgattcaactaccaaatatattgcaagcaccagaagaggtattggtttttcctgactttagctatttagctgaaccattaatttataccggagccattacacttgcgatcgtggcatctttagaaacattactaaatttagaagcagcagataaacttgatcctcaaaagcgttcatctccacctaatcgtgagttatgggcgcaaggagcaggtaatattgtgtcaggtttgattggcggaatgccagtgacctcagtgattgtccgtagttctgtaaatgccaatacaggtgcacgtagtaaatgctcaaccattattcacggtgtgttgttactgcttgcaattctattttttgtcccactcatgaacatgattcctttgtctgcacttgcagcaattttgatcgtgactggttttaaactgactcatccaaagttattcaaacagctttaccaaaaaggttggagacagtttttaccattcattattaccttggttgcaatcttgctgacagatttattaaccggaatcttggtggggctatttaccagtagtgcatttattttatatggcaacttcaataaaggtgttcgtgtttataaagaaaagcatttacatggaatcgtgacgcgtattgaacttccttcacaagtgacttttctgaatcgttccgcgctcatttctgccttggaacatgttcataaagatcaacagttgattattgatgccactcaatgtgattcgattgatccggatatttatcaagtcattcaagactatcaaaatgagacggcagttaaacgccaagtcgaccttaagcttattggatttaagcagcactatgaagaggtagatgatgcagtactggatatctacattagtacgagagatctacaacgtaaattaagtccacagcaagtcattactttacttaaagaaggaaatgaacgtttcgtaaaaaatgagcgcttgcaacgtgatatttatcgccaaattcgtgttactgcagatgaaggccagcacccaattgctgccgttttgggttgtatggactcacgtgctccaactgaaatgatttttgatgtgggtattggtgatctatttagtttaaggattgcaggtaatattgcaggtcaaaaggtattaggctcgcttgagtttgcttgtcaggccaaaggctcaaaagtcattttagttttaggccatactgactgtggtgcagtgacgagtgcatgtcagttacgcttacagcaaaagcaaatctctgatgtcaaagagatgccgcatattcaatatgtgcttggtccgctcatgcattcggtagaaagcgtatatgacattatgcaaccccgtgaattaaacaagaccttcgtaaatcaggtaactgctatgaatgttcactacaatatccaatatattattaataacagtacggtacttaaagacttattggatcgtggtgaaatagcgattgttggcgcgatttacgatgttaaaacagggcatgtcgagtttttagatgcgtaaatagaatcaaataaaaaagcgcctttcatgaggcgcttttttatttaagttcgctgaatattttaaattaccaatgctcacctgggaaaatgcgtgcatatgctttttgcacccagttaagtttttcagcttttttgccttttgcggcgtctgaacttggaaacagacggaaaccaatcgacataaacatattgttaatgccaggggccactgaataggtcatagaagccaaacggcctaagttagttgcaatacgttttggacgtttcacaattgcataagcaattaaatcggctgcttgctcaggtgagagagtcggtacatatttataaatcttggtcggcgcaatcattggtgtacgcactaaaggcatgtaaattgaagtgattgcaattttatgtgcatgaacttctgccgatagacaacggctaaatgcatcaagcgcagctttagaagcaacataagccgagaagcgggttgcatttgctaatacaccaatcgaactaatattaataatttgcccatctttgcgttgaatcatgtgaggcaaaatattgagtactaaacgtacagcgccaaagtagtttaattgcatagtacgttcaaagtcgtggaaacgatcataagactcatgaacagcacgacgaatagagcgacctgcgttattaattaaaatatcaatatggtcaacagaagctaaaatctctttagaaacctgatcaatcatttccatgtcattcagatcacatgggaaaattgatgcctgaccgccacggctttcaatatctgctttgacttcttctaatgtttcttgagtacgggcaaccagtaaaacatgcgcaccagcgtcagcaagtttattggaaatcgttaaaccgattccacttgaggcgcctgtcactaagatgactttaccttgtaccttttcctggaacagagcttctaattttttattcacagcattttacctaagtaggggcaggggctatttattccggtatgtaatttttatttttacaaccgttggttcatcctgatgaactcctaaatattgccttatcttaatagatgtttaaaaattgtctagtgtgtaaatatatgaaatttaacaatttatttagagtaaaaactctaaattattaccctaatccattaattattcttaatagttaaatcacttaaaaataaaaaagcctctatattccagaggcttgttagatgggtttaaaatttatacggatgaaagtgcttgttctaaatcggcaatgaggtcatcaacatgctcgataccaattgaaagacgtaccatatcttcacttacaccagcagcttttagttcttgttcgttgagttggcggtgagttgtggttgcagggtgacacgccagacttttcgcatcaccaatattcacaagacgggtaaatagctgaagggcatcaatgaagcgagtaccgccttcacggccatcttgaaccccaaaagataaaattgcagaaggtttaccttttacatatttttgcgcaagttgatgttgtggatgatcttttaagcctgcgtaattgacccattttactttcggatgattttgcaaatattccgcaattctttgtgcattttcagtatggcgttccatccgtaaattaagcgtttctagaccctgtaaaattaagaaaacactgagcgggctaatagctgcgcctgtattacgtaatggtacaacgcgagcccttgctatataggcagcttcacctaatgcctctacatagttcacaccatgatagcttgggtctggcgtgttcaatactttaaaacgctccggatatttaccccaaggaaacttaccgctatcgataatcgcaccaccaatactattgccatgtccaccaatatatttagtcaaagaatgtatgacgatatcggcgccatattggaatggttttaataaagcaggggtagcgactgtattatcaacaacgacaggtacgccatattcatgggcgattttcgaaatttcttctagatcgatgatatttccgagcggattgccgattgactcaacaaaaacaagtttagttttatcatcaattaagttacgtaagctttcaggcttttgataatcaaaaaagcgaacttcaatgccttgttttggcagggtatgagcaaataagttgtacgttccaccatataaagttgagactgaggcaatattatctccagcttctgtaatcgtttggacagcataggtaatcgctgccattccagaagccaaggctaaagcaccaataccgccttctaacgcagcaaggcgctgctcaagtacggctgtggttggattcataatacgggtatagatattgccttgaacttttaaatcgaaaaggtcagcaccgtgttgtgtgttatcaaatgcatacgaagttgtttgatagatagggactgcaacagctttagtagttgcttcaggagtgtagcctgcgtgaatggctaaggtttcatctttataagtcatgattacttcatcttcgtgagttaaatattgagcgagtctagcttaaaatttatatagaaaattgcagaaattctggtttgttatccaattttaggaatatagatagaaaaatatacgctgaaacgttgtataaatcttatacgtaaacattttgcaacttattgaaaaagaaaattgtttgataaatccgtacgatggaaatcataacttcaagtcattagtgttttcatcgtataatacgcgcgattatttttgtcgcgtcttgcgatgtattggtttttcaattgaggagtcctgcgtggcccaatatatttatacgatgaaccgagtgtctaagatggttccgccaaagcgcgaaatcttaaaagacatctctttatcatttttcccgggtgccaaaattggtgttctcggtttgaacggtgcgggtaagtctaccttgcttcgtattatggctggcgtagataaagatttctctggtgaagctcgtgcacaacctggaattaaaatcggctatttagagcaagaaccgccacttgatccgactaaagacgttcgtggtaacgttgaagatggtgtgcgtgaagctttagatgctttagagcgtcttgatcaggtatttgcagaatatgcagacccagatgctgattttgatgcgcttgcaaaagagcaggaaaaattagaatcaattatccatgcttgggatgcacataacctaaacaaccagcttgaaatcgcggcagatgccttgaaccttccagcttgggatgcagatgtaactaagctttctggtggtgaacgccgtcgtgtagcactttgccgtttattgctctctaaaccagatatgttgcttcttgacgaaccaacgaaccatttggatgccgagtctgtatcttggttagagcgtttcttaaaagatttccctggcacaatcgtggcgattacgcacgaccgttatttcttagataatgttgccgagtggatcttggagcttgaccgtggacacggtattccttatcaaggtaactatacttcttggttggagcaaaaaaatgctcgtttagaacaagagcagaaacaagaagaatcttttgctaaagcattgaaaaaagaacttgaatgggttcgtcaaaatgcgaaaggtcagcaaaagaaaaacaaagcgcgtatggagcgttttgaagagcttaactcacgcgaattccaacagcgtaatgagacctctgaaatctatattccacctggtccacgtttaggtaacaaagttgttgaagtagaaaatatcagcaagtcatttggtgatcgtttactttacgaaaacttgtcatttaccgtaccaccagcagcgattgtaggtattgttggtcctaacggtgccggtaaaacgactttattccgtatgatgacaggtgagcaaaaacctgacactggtactgtaacacttggtgattcggttaaagttgcttatgttggtcagattcgtgacactttagatgataacaaaacggtttgggaagaagtttctggcggtttagacatcttgaaagtgggcgattatgaaattgcatcacgtgcttatattggtcgttttaactttaaaggccaagatcagcaaaaacgcgtaggtgaattgtcaggtggtgagcgtaaccgtttacaacttgcgaaaattttacagcaaggtgcaaacgttatcttactggatgagccatcaaacgacttggacgtagaaactttacgtgcacttgaagatgcaattttggtattcccgggtacagtaatggttgtatcgcatgaccgttggttccttgaccgtattgcgactcatatcttgtcatttgaagatgaacaaccagagttctatacaggtaactataccgagtttgaagcttatcgccgtgctaagctaggtgatgacgctcagcctcatcgcaagaaatacaaaaaaattagcggttaattactgctaaatttaaaaaccagcctaagggctggttttttgttagaaggcaagtttactaaaagcttcttgtaagcaacgttcagcatcaggatgtccctgacttgctgctttgtttaaccacttttcagcttcagtgtagtttttatctaaaccaaattgaccatttaaatagccaataccaagtttaaaggaagcgtcagcattacctcttaaagctgcacggaggtagcaccacatcgcattgcggtcatttggggtaatatctaaccaattctgcatacgttcatgatcttgtatggctaactcttcaaagcgtaagccttgttcaatttcatcctcagcttgtgaatgcatatcggctggtaagttttcaaaggcaaacaagtgattaagcccatgcttgattgttttcatattcatgacagtctccccttgttcctcaatttgattgaattgactcacacttttaagctagtcccttatatgaaaatcttatgttattttttgtaaatctgatatagcgcatttggatgaaaaatgatgaagttttagcttacataaaagttacacatgtttttacgcttagcgaaacttctataaaagtattggtatacaaacgtgaaaatagaatttaaaaagtttaagaacaaatgattattcaaaataaaaaaattgagaaaatttataaatatcaaacaaaagaaattttcttaaacaaaaccagtctaagggctggttttgtttttagattagtaagggtgcttatttagtaaagtcacctcgtaaatctgacaagatgagagaaggagctaccgtcactatatcaaatgccatcgctaaaggataaagcgccatacgcgttacacgtttaaacggatgtttcttggttatttcatctttttgttgtaaggcgattggatatggagttggaatcgtttgttgaacttttaaagtaggactggtttgataaatttggcctttaaaacgaataatagcgtagggatataaaagctgtgtttggttctccataaccataaaatgatttttaaaccctaaattttttaaattttctttctgttgatcagaaagttttgaagcgggaatattgtattgaaacttgagttcaccatgaaaatgcgtagggtcatccatttcaagtagcagaggagatggaataattaaagttctttgatttacaggaatatttttaatgatatttaaaaattccgaacttccttccgtcattaaataattaaagtcttgtcctataaatacgacgccttgttcttgctggtttttaatggcttgccccagtacaataatttgatctgtctttaaaatagttgtttggacctcagtcgtctcattcggaagggcagtcgataaaatagaagttgcacatccacttaagccaagacaagttactagtaggcaagtggtcaatgttttatacatgaacattactcttaaaaattatttttaaaaaacttaggaaacatctgggttaagaatggaacccataaatcaacgttttgtaattttattacatgtagctcgcctgctatagttgcttcgtgcaatttctaacagccatggtgtactgttgccacgttctgcaattttcacgtccgtcttattctgtttgcttatattccagagtttatggaatatagcagcggctttttgcgcgcatgaaaatcaagaaaaagcactacatcattttggtcatcatgcagctttaaatgtatatcaaacgtcttctcatacccatgttgaacatactgagactttagatgctgctcataaagcacctttaaacttacaagaccatcatgatcatttaccgacatgttttcatgtcgtcatgacagaagttgcaaaacaagctcaaacccctgttttacatgtgcatgaactttcacaaatttatcattggtccaattcttaccagtctccacatcttagtgccttaaaaccgcctcctgttttaaccccgctataggtggggtagccaaaaaaagcccaccagaaatttatttatttcaaagggttattttatgcttaattatatgtgcaaacaaagcgcagcaatcttctatgtagattactcgcttaaacattcacgtctttatgttaatgacaaggcgggatataaggttctgtcaaatttttccggaacacaaaaatatcattttaatgaatcggttatcttatctctgatgattcacagtgatggaggtttatggaaatgaatattttatttaccccccgtgttagaactgtgagctcccgagtgattgggctgattttagctattattcttgctttaagttttagtaaatggcatttccaggcggcatttatagaacatattttatggttctttggatggttttttgtgggcataggagtaatgggaagaatatggtgcagtctttacatttccggatttaagaatgctaagttggtgacagacggtccctattctttatgtagaaatccactctatctgtttagttatctgggtggagtcgggatcatgttgattacagagacgtttatctttccaatagtattcacgctttattttctctgttactaccattttgttatacgccaagaagaagcattcctaagtgaaaaatatggaactgcatattcagattatataaagacaattccacgctttttaccaagtttcaaaaattttaaagagcctgagttctatcaggtttcaccgaagcatttccgtatttttttgacgcaggtggtgtggtttatctgggttgcggccttagtccaactttttgatgagttgcgactgcacggtgttctcccttcattgtttagttggttctaaaaatgaaatgaaagtatatccgcatgcttcttagagactcagaagatttgtcctgaattgattaactaaggtatgcgaaaaattaattttatttctgggataagtccttaaataaattaggaatatttagatctggtgattattatgtctattaaactaaatacaaaatcggctttgatggttttacttctttcaacaagtttggctcatgctgatggagggttaatattcctcgaaaagaatcttaagtctcagcaagaaacaaaagctaaagctgaagaaggtaagaagcctcatttaacttgtaagcataaataattttttttgtaggaaactaattacttaataattagtttcctatgagtaaagataaagattcttaatgatttattcttatctttactcaggcgagattagaatcgcttctatactgctacttattagatgtaattttattacatgcccacggcctgctatagtggctttgctcaacttcttagtttaatggtgtgctgttgccacgttctgcacttttcatgtccgtcttattctgtttgcttatattccaaagtttatggaatgtggcagcggcattttgcgcccatgaaaatcaggaaaaggcattacatcattttggtcatcatgcagcgttgagttatgaagcttcacagcatagccatacggaaaagacagatatcgcggggactcataaagctccgttaaacttgtccgatcatcatgaccatttaccttcatgttttcatgttgtgattgtagaagcacaagaaaaaattgtttcaccgttaatacagtcatctgagccaaaacaacaatattattggtctaattcttataagtcccctcatatctctaaacaagacccgcctcctgttttaaccctgctataggtggggtagccgaaaaataacccaccagaaatattatttatttcatagggttattttatgtctatttttttatacaaaaaaagtttcgttagtctgagtacgtcttgggtacttaaatcattagttgttgctgttgcactttcaactggtgtcgtaacaaacgcagccagttcaaatcagaaccttgctgagaatacacaactacagcgtgtacagaatgttttaacttttgaacaggtgctcgatcaggttaagcagtttcagactcaaacaggaatttggcaaactcaacaagatatcgccgagagcaatatcaaacagagccagctatgggaaaatccgacggtttctgtacagcaaacgggttttaaatctggaaaagatcaggaattagaacttgggatctcgcaaaaactagatatttttggtgtacgttccgcagcaaaaaaactagcaagtgttcagcaaaatcaagttgagttaaatcaggttttatatgaggctcaactgaagctggcggtaaaatatttatggtcacaagtatctattttagagcttgaacatgaagttgctaaagcccagttaagaacgagtaagaaccttttagatgctacccgcttacgctttcaggcaggcagtattgctcaggttgatttagatcgaactctcatgacgcatgttgaaaatcagcgtttatatcaggaagttgaattatcactgagtagtgctaaaagaaaattggctaacttatggggtgagacagaagataacttcacgttacgtccagatataaaaagtacgtggcctttaaaaaatgaaagtgatatcgaccaatatttgaaacagaatttgttagaacagtccctacggcttcaagcaatacaacaaaattctgaaattaattatttaaaggcaaaaaatcggcctacgcctactgtaaatatgggcgtggttcgtagtaaaaccgcagaaacgagcagtaccgaaaatcagatccgagtaggtatagcggttcctttaaacatttttaatcgccagcaatatgccctaaaagttgctcaaagcaaactcgatttaattgaccagcagcaaagcttttataaaaagcaaagcgagaattctattcgtactctacagtacgagttagcgggtttaaagcagcaatataatttaatgaatgagcagcaaatccctttatcagagacggtacaagagaaaatgctgcttggctttaaagtcggtaaatttgcaattaccgatgttcagcaatctacccttcaattacaagaacaacgcttgaaaaaagttcaacttcttaaatctgcttggcaaaaagcaattgaggcagaaagtttagctctcgggatcgatccaaatatggtgatgtctggagatgcattaaatcaaattaatcaaaatttatggcaagacacctatcagttgccgacagttggaggggcagagtaatgtcagttaaaaaaatgaaaaaccaatggcttattgctattttgctgctgattgtctgccttgctttaagtgcttggttatttttctctggaaaaaaacagcctaatactgagaaaagtgaagaagcgcatgcagagggtgaagctggtcatgaagaatctgaaaaagaggaaggcagtttaaacttaacttctaagcaactggttgaatatggagtgaagttagagcaagtaggacgtggagaagttgagcagaatctctcgtatcctgccaaacttgttgtaaatacagaccagcaagcacatgtctcttcaactttttctgcgcgtgtagatagtgtaaatgttgcgttgggacaacaagttgaaaagggtcaggcgcttgcgactttatttgtacctgatttagtcgatcaacaagctaacttaagcatggcacaagaagcactgacattagcccagcaagattatcaacgtgaaaaacaattgtgggaacaaggggtttcagcacgtcaagattaccagcgcgcttacaatgcttatcgtcaggcgcagattcaagtgcaggctgcaaatagccgtttatctgcattgggagcaaatcgctcaagtaaaggtcgatatgttttaactgcacctttaagtggtgtaatcagtagtaaagatattgtcattggtgagcaaattggtcctgaaaaacagttatttgttattgatcgcctagatcagttatggattgaatttgtgctaccaagtgcaaatactaatattcagcctaatcaggaaattgaatttaaatcactgcaaacgaataatatttttaaagcacaggtacaaagtttaacttcagaagcagatactcaaactggtcgtctacaggttcgtgccaaggtactcacaccttcaaaagaattacgccctaacttaatggtcaatgtgttactgaaacaaaataatgcagcgactgtattacgagttaataagacagcgatacaacagattgatggaaagaatgtcgtctttattgcaaaacaggagaaggacaaaattcattttgctcctgttgcggtagagttaggcaattattcttcagatgcacaatgggtagaggttaaatctggaattactgaaaagcagcaatatgtgactcaaggtagtttcttgctcaagtccgaacttgaaaaaggggaggcagagcatggacattaataaacctgatttgccaaaggctgaaggtttgtttgatcgaattattcagttttcaattaacaacgccatttgggtcatgatgtttgttattgcttggattggtgtcggaatttatagctatcaaaaactttcaattgatgctgtgcctgatatcaccaatgtacaggtacaaatcaatagtcaggccaatggttttacagcaccagaagttgagcaaaggattacttatccgattgaaaatgccatgtctggtattccaaatctggaacagactcgttcaatttccagatatggtctttctcaggtcacgattatctttaaagatggtactgacatttactgggcaagacagctgattaaccaacgtttacaagaagctaagagtgctttaccagatagcattgatccgcaaatgtctccaatttcgactggactcggtgagatttatcaatgggtggtaaaagcagagccaaatgctaaaaaagcagatggctcagcttatagcgcgatggacctgcgtgaaattcaagactggattattcggccccagttacaacgtgtacaaggggtagccgaggttaatagcattggtggatataataaaacctatgtggtctctccagatctgacacggttacagcagttgcagattccacttaccgacttacaggatgcgcttcaaaataataatgaaaaccgtggtgccggatttattgaagagaacggccagcaactcaccgttcgtgttcccggcatgctgatgtcaatacaagatatccagaatgttacggtcgccactaaaaacggtttacctatacgggttgccgatgtagcgtcagtatcgattggtcatgatttgcgtacaggtggtgctacctataatggacaggaaactgttttaggtatcgccatgatgatgatgggtgaaaacagtaaaactattgctaaggcgattgacgataaagttcaggaaattcaaagatcactccctcagggcgtggtgattgaaacagtctatgatcgtagtagcctcgtagataaagcgattaaaacagtagctaaaaatttgattgaaggggcgattttagtcatcgttatcctttttatttttttagggaactttcgcgccgctttaatcactgcttgtattatcccattggcaatgctttttaccttaacaggtatggcggaacaaaaaatcagtgccaacctgatgagtctgggcgctttggacttcgggatcattgttgatggggccgttgttattgttgaaaactgtattcggcgtttagctgaagcgcagcatttaaaaggtcgtttattaacacgttcagagcgtttcacagaggtttttctcgcagctaaacaggcacgacgcccattaatctttggtcagatcatcattatggtcgtgtacctaccaatttttgctttagcaggcgttgaagcaaagatgtttcatcctatggcaatgaccgttgtcctagcattattgggagcaattattttatctgtgacctttgtcccggcagcagtagctctgtttattacgtgtgaagtgaaggaaaaagaaagccgctggatgatgacgctgaaaaaaggttatgcaggcttactcgataaagcatatgcctttcgatatgttgttgtcacagcagcggtcagcatcttaattttgacaagtgctattgcaacaagagtggggagtgagttcgcccctcaactcagtgagggtgattttgcattacaactcatgcgtgcaccgagcacaggcatagaagagtcgcttaagattcaagagaatgtagaaaagcagttactgaaagctttccctgaaattaaagccatttttgcaagaacaggaacagccgaggttgctaccgatgtcatgcctccaaatatttccgatggtattgttctattaaaaccacatgatcaatggccaaaccctaaagaaacgatagatgaattgcgtaccagaatgctgcaattcgtgaatcagattcctggtaataacagtgaattctcgcaaccgattgaactacgttttaatgaactcatttcaggcgtccgtagtgatatcggggtgaaagtttttggggatgatatgcaagtcctcaatcaggaagcggaaaaaatagcccaacagctacgtagtattccaggtgccagtgaagtcaaagtcgaacagactgatggtttgccattacttaatgtagatgttaatcatgcactagctgctcaatatggattatcagtcaagtctattcaggatattgtcgctgcgagtattggaggacagagtgtagggcaaattttacagggcgatagacgtttcgatttcgtgattcgcttacaggaaaacatgcgtacgcctcagcagctagcacaattaccgattcgcttaccaaacggcggtctgatccagttacaagacgttgccaaggttgagaatattctgggccttgctcaagtgagccgtgaaaatggcaaacgccgagtgattgtgacggcaaatgtgcgtgatcgtgaccttgggtcttttgtacaagagatgcaaagcaaactggcgcagcaaaagctacctagcggttattggttaggctatggagggcaatttgagaatcttgcttctgccactgcaagaatgcaaatcgttgtgccgatggcgctcatcatgatctttgtattgctgatggcggtatttagtaactttaaagacagtttacttgtatttagcggggttcctttcgctttgtctggcggattagtggctttgtggctgagagatattccgctttctatgtctgctggagtcgggtttatcgctttatcaggtgttgcggtattgaatggtttggtcatgctcacattcattaaagagctaagagcaaccctagatgttcatgctgcaacttggaaaggtgctgtactgcgactacgccctgtattaatgacggcatttgttgcttcacttggttttattccaatggctttggcaactggaactggtgcagaagttcagcggcctttggcaacagtggttattggtggcattatttcatctacgatattaactttggttttattaccggtcatttatcgatggatgaatgaagacaagacgaaaagtgttgagcattcataatgtcatcgatttgagatatcttttttgattacaaaatttaagtcgaaaaagtgtttgtaagagttaaaggtaaagatgtcttcatcgttacttttaactcaccataaagataaataaaaaggagtccgcaaaatgggtggacatcatggtcatgaccatagtcatgctgtagtgactgaaggtaatgctaaaaaattaacgattgccttggcgcttaccacgacattcttaattgttgaggtgattgcaggtttaatcacacaaagtttggcattgctctctgacgctgcacatatgtttacagatgcagctgctttagccattgctttggttgccatacagatttctaaacgtcctgccgataataaacgtactttcggttatcagcgctttgaaattctggccgctttatttaatgcacttatgctttttgtggtggcaatttatattttatatgaagcctatatccgcttttcgcagccacctgaaattcaaagtgtaggtatgctcattgtggcgaccattggtttggtaataaacctcatctcaatgaaaattcttatgtcgagtgccaataacagcttaaatgtgaaaggtgcttatctagaagtattgagtgatgcactaggctcagttggcgttattattggtgcaattattatttacttcactaattggtactggattgacacgcttattgcggtactgattggattttgggtattgccaagaacatgggttttacttaaacaaagtattaatattttgctcgaaggtgtacccgaagaagtcgatattgaaaagctacgtgcagatttactttcattaaatggtgtggagagtattcaccaactcaaagtctgggcaattacgtctaaaaatatccatttaaccgtgcacttatttgcgcctgaagctgaccgtaataagctctatcaagatgcagttgaaatgctttctcatgagcatggtattggtgaagtgacattgcaaattgaagatgatgctgagatcaactgtcagcatattgctcaacatgcttcacacgaacataacgataatgacaagacgcattcacatcagcattaagctgatgtgaatatagttttaaatttcccactcatgattgcagtcacgacatttccaatgtttttgtgactgcataaatgcttgcatagacaatttaaaatcaggcagatcgcgccagaacataaaacctgcacctacagtaaccacaaatgcaactactgttgcaatttgaagagagctgcctgcaccattgccaaaaatccacataaaaatactaatcacaaccaagagtaaaagtacaaaaatggcaggaactaaaatcactaagcttttaggcacaacaggtttagcactattaacaccttggctcaccggcataattttaacactttgacattgagggcaacgatattgcatgacagctccacattaagtttgaatctattctaacggaaatacaaagaaagaaaaaaatttgtagctgattaaaaagttgaggtgaatatccgatataaaatacttttttgaaacaaggatatataaaaaaacgatgatttatgcgtacacataaaaattaaaataatactgtagagcatgctaatctagataaaaaccaagtgtgtccaacactggaaatgagctgaaatgctcattaataggatgtgaaagaaatataaaaaggagagggacttgggtcaagaagatgacaataagtcgaagcctacaacgacatcaacagtttcagggaatcctgaccctataaaactgtcattctcacgccgtttgctgcataaaacattacagcatgcacaagatgccgtcgggtttgctagtgatactacacgtaatcttgctgaagttgctgatgcagccctagatgctttagatcaagtgacctctcatacaaagcgtggagtggtgggcatgaccaatctggcagcagggactgtcagagatatggtgtctgaaacaagtgaaactgcaagacaggttgccttaatcatggcacgtacttttctaggtaaaagtaccttgaatttgtatttgcctgaaatgctattaaacagtcaaattcgtaaacgcatagatcgttctgaaattgatgatattaaagttcaatgtggcaatgatcggtttcaggttgaaatcgatggacactatcaccgtttcctatatcgcctaagtttagattttcgagtattggaatgccgcattggacaagaaaagttcttgcgcttacgccaaatggatgaaagtctggatgtgcaaatacgtcatggtggaacattatcgaattgggctgttcgccgtattggtcgagtaggttttgaagtgattaatatgttgcctattccatcgctgattaatcatttgattcgtgatattccgggtattcagcgtgatggtcatcgcatgtggttcattgaccttgagcaagcgggttttattgatttcattaataaccgttcatggatggtagaaaaacttttaaatttaaccgactttagtattctaccgggactcaatattttaagagaaagtcgtgagcttgtgcagcaactggtagatcagttcgaaataaaaggactacgtgttcaatcaggccgtctggaagttcaagttggaatcgcaaattaaataagtatgatgggaagctggtttatgatcagcttttttattgtctagataagaaaaaagccactgtcgttatgcagtggctttttagaatttggcgtccctacggggattcgaaccccggttaccgccgtgaaagggcgatgtcctaggcctctagacgatagggacttatatgaggcatacatctgaaaaatattggcgtccctacggggattcgaaccccggttaccgccgtgaaagggcgatgtcctaggcctctagacgatagggacgtttcagaggtgggcgtatattaggtcgatttaataaaagtgtcaaatagttttctgaagaaatattaaaaaaatcagttaagcgcttaaaaataactcaaattgtagaaaatatatacgtttatagatattttttattggaaaggctcaataattgtttttaccacagcatgatgttgtaagtagccgacaatttcatgaggttggttggcaaaagtaaaaatctcttgattaataatggggggagtaaaattaaaaggtgcctcacttaatggaaaagcggttaaaaagtcatctttagaataaaagttataccagtcgccctttaaacatttaggacgttcaatgggagtggggagtttgctttgtatgacgcgaaaagaaagaggggatgctaaggtaataaagcgctgtactgaaaactgataagaaggatctgataataaatgataggcaatcacagaacccaaagagtgggcgactacaatacaatcttcatcatcatgcatttgttttaaaattctttgatgaacctcatacataaaatcaggattagataagtacatataagtttcaatcaagaattgctgaattaagctttcatgtaattttggaaaattatttaaaagaaccaccatctccttaagaacgcgatctttcaccatctgtgaagttaaatataaacgctctgataagctttgcgctggttgatcgggtgaaagagggaggtggggtataaaaggagtatgttccttaggtgttgatggttgatgatgtaaatggatgggtaaatgaaaattaaaagtttttggaagtaaagtattaagatcaagttgattggataattgatacttcgtcattaaatcgccataaaatggcatatgtatatgtagatctcttaaattaactctacagtgcaattgttttaagcccagtttaaatacttttagccagtgctcttttaaacgatgtgcggtgtaattctgctgattcatcccatggataaatataattttcattgtatacaaggaattgttttttaatataaatttaaatctacaacggtagattatataaagccagtctctaagcaaaaaaaagtgtagctttttgctacactttttaaattacaaacacttaagctttatttcgatagaaaataaagtagctgagatagcacaaggcagtaaaaattaagcaacctataaagccagcacgcatttcaggatctgctgccatacttaaacatgtaataaagcagaaaagaaaacctaaaattggaacgatagggaataacggtgctgcatattttaaatcgctaaccgtatgtccagaacggtaccattgtcgacggaaattgaactggcttaaacaaatactcatccagacaataaccatggtaaaagctgcaacacctagcaagtttttaaagatggtttcaggagcaaattgctctgataataagcctggaattgcgccgaacatcgttacaactaaagcaacaataggtgttccgctttttgaaagtgttgcaaatacacccggaaggagcttttgctctgataaagaccacatcatacgtgaagctgcatataatcccgagtttgcggctgagagtagtgcagtaataataacaaaacggatgatgtcatctgcatatggaataccgatgtaattaaatacggtaacgaaaggactattacttacgttgtcaccacctaaaccagcaagttggaaaggaagtaatgcactaattacaataatggtgcctacaaagaagataagaagacgccagattgcagcattaatcgctttagggacattctgagccggatctttagtttcgccagcagctacgccaattaactctgttccagagaaagcaaagtttacaatgagcatagtggtgaaaataggaagaaaaccgtgtgggaaccaaccttgggcagttaaattactaaacaatggagcagtttgagcgccgtggaaaggaattaaaccaaaaattgctaataatccaagcacaataaaagcaataacggtaatgaccttaactagcgctagccagaactctgactcggcaaatactcgggttgaactgatatttaacccgaaaatagttactgcaaaaataagtgtccagatccacattgaaatttgtggaaaccattcctgcataagtagagcagcggcggtaaactcggttcctagcgttgctgtccatgttagccagtacatccatgaaatcatgtaacctgtacttggactaatgtactttcgagcgtatgcgccgaaagaacccgaaacgggcatatgtacagccagctcgcctaaacagagcatgaccatgtaagcaattgcacccccaagaatataggcaataattgcgccaataggtccagtttgtgaaatgacttcccctgaacccaaaaataaaccagtaccgattgctccacctagcgataacatgacaaggtggcgagtactcatggctctttttaaaggtgcagtactgttctgatgctgagcatctagttgtttgtcagatggctgcatattacacattgagagaatttgagaaagacgctattttagataaaatagacaaatgtgcaatcaagaagcagtcaaagaatagacaggaaggtgacgatagagtctttaaaaggaatttttaaaatagaaaatggcgtccctacggggattcgaaccccggttaccgccgtgaaagggcgatgtcctaggcctctagacgatagggacttgatgaggcaaacacaaaggagcttggtggagccaagcgggatcgaaccgctgacctctacaatgccattgtagcgctctaccaactgagctatgaccccagtttgtgtgagcgcaatattagggtgaatgcgctcacacgtcaataaaaaaatgaattaagcttcgctagttgcttcatttttcggcaattttaaactttcattaagcttttcccagttttttacctcttttttactcggtgcacctacaatttctagcgcatgtcgtaagcgagcaaaggttaagtcagggccaagcgtaaccatcgactgcataactggtgttgaacttgttgagccagcaattgcaataaagaacgttggcatgaagtcacgtaatttaatgcccatctgatttgccaaatccattaaagtttgactaactgtgtcgttattccaagtaaactgactttcaagacgccaaattgcgaattgtaaactttgacgaacttgctcttgagtcaattttttactttcaaacatttcagccgtaatttgtggcatatggttaaagtagaaaccagcccaatttacagcttcagaaagtaaattaatacgtggttgaatagcggcagcaatgtcttctaaagtgctgcgatcacttttccatgtcaataaacggtctaatagttgtcctggggttaaccctttaatccattgaccatttaaccaattgagtttttcaacgtcaaaaattggtccacctagtgatacgcgttgaatatcaaagttatccatcatgtcttgtaatgtgaaaacttctctttcatccggcattgaccaacccatacggcctaaatagttgagtaaggcttctggtaaaacgccgatatcacggtagtagttaattgaggtcggatttttacgtttagataacttcgatttatctggattacgaagcaacggcatatggcaaagcgttggcatttcccaaccaaagtattggtaaagcaattgatgcttcggtgcagatggaagccattcttctccacgcaatacatgagtgatttccattaaatggtcatcaacaacgttagctaaatggtaggttggtaaaccatctgttttaagaagcacttgcatatcgacttgtgcccaaggaatttcaacttcaccacggagtaagtcgttaaatttacacacgccttcttcaggcactttcatacggataacatgaggttcacccgcttcaagacgtcgagctacttcttcttgagacagctttaaaccacgaccatcgtattttggtgtttcgccacgagcttgctgctcggcacgcatttggtcaagttcttctgctgtagcaaaacaataaaaagcatgacctttttcaacaagttctaacgcgtattgcttataaattcccatacgctctgattggcggtaaggagcatgaggaccacctacatccggaccttcagaccaatttaagcctaaccagcgtagagagtctaaaatcattttttcagattctggcgtagagcgaagctggtctgtatcttcaattcttaaaataaattccccgccatgctgtttcgcaaaacacatattgaatagggcgatgtaggcagtaccaacatgtgggaaaccggtaggagacggtgcaatacgagtacgaactttcatagttaatgggtcaaaataaaaattggaactattataacgaaaaagcccagtattctgacgttttatttaacgacagtctgggctgaaattgaaacgatgaggggtcgtttcaaatattaagaagtgtgcggctggaagattgcctgaacaaaacgtgaaaaacgttcatgctgtgctgcaagaaagttttgagttggtgtaacacggatagtattaagtacttttaactcatcatctgttgatggaagtacaatagtgttacgtttttgctgatctaaagctttttcaataagtgaagactgtttatctgaaagacttttacttggtgtatctttcagtacggctgctgtagacagttgcgatgcaaaactaagcaccaaacccaagcttaaagcttttccataatgaattttcattttctgttcatcccctcagtacatttcgtctattttttgagtttaaccaaatgtaaaattacggtaacgctacgattcaaacataaattttaataaaaaagtagaactatgtcacactttttacaaaaaatacctttattttacgctggtacctttaaatgtagcctatgtgtatccattacgtctcattatttaacaaattaatgtgtagataaagtgaagactataaataaactataagaataattacaaaacttttcaaaaaggagaaggaaaaattagagttaactatatcttttaaagtgattagtaaaacatttatttatataactatttgattgaaaactaaaaaaataaaaatatagtagacgttaaaagtaaaagtggtttttataaatgaaaagaatagcaagaattgcagtcgctacatatatggggttggcagtaagtgctgtgcaggcggcgactacatttttaaatgtttcttatgacccaactcgagagttttatcaggaatataatcaggcatttggaaagttctggaaacaacgtaccggacaggacgtggattttaaacaatcccatggaggctcaggtaaacaggctcgcgctgtagcaactggtcttgaggcagatgtggtgaccttagccttagccaatgatattgatgaaattgtaaaagcaggctttatccagccaaactggcaaaaagaattccctaataattctgcaccgtatacctctacagttgtgtttttagtacgaaaaggcaatccaaaaaatattcgggattggaatgatttaactaaacctggtgtcgaaattattacgcctaatccaaaaacgggtggggcaccgcgttggatttatctttctgcatggggatatgctttaaagcagccgggtggaaatgatgctaaagccaaagagctggttaaaaaactttatcacaacgttaaggtgttagattcgggagcgcgaggctcgcttactacatttgctgagcgtggaattggagatgttctactttcttgggagaatgaagcactattggcaacgaaaggtctcgataaagataaatatgaaattgtttacccatcaatttcaattttggcagaaccatctgttgccattgttgacaaaacagtcgacaaagacggtaaccgtactttggcaaaaggttatctcaactttttatattcacctttaggtcaagagttggctgctaaacactatttccgtcctcgtaaccctcaagttgctgctaaatatgcagcacaattcccaaaaattaaattatttacgatcaatgatgtttttggcggttgggcaaaagcccagaaaacccattttgccaatggagccatctttgatcagatttatgatggaaagcagtagataaaatattggtagagtagaagtttaaaaattagtttacttttttatagtgaagcaagtgagcctgaaaaggtgagcttgcttttttgttttgcttaaaaaatgaaaagaaaacggttttctctatgaaaaattaatattttcctacaaaaagccgtttggtgttagccataaacaaggtgataatgtgcagttacatttttacgctatgatttaactcctatgtcgcatatttctgtcttactttttgagaccgttgaaagcttattggcagatcgcacaactggggtgtatatcgatgcaacctttggacgaggtgggcatacgcgcttgttattgtcgaaactcgatgaaaacgcccgagtatatgcttttgataaagaccctcaagctctggaagttgcggctgctttagcacaagaagatccaagatttacgattattcatgcaagttttgctgatattaaggaaaaaatgcaggaaattggggtgcaaagtgtcgatggaattatggcagacttaggtgtgtcctctcctcaactcgaccaggctgaacgcggctttagctttatgcaagatggcccgttagatatgcgtatggataactctaagggattgactgctgccgaatggttacttgaggtagaagaggaagatttggcaaatatcatttatcaatatggtgaagaacgatatagtcgtcgtattgctagagcaattaaacaggccggaaaattggatactacggcgcaattggctgaaatagtaaaaacagcccatccaaaatgggaaaagcataaacatccggcgacacgtacgtttcaggcaatccgtattgctattaacaaagaactagatgatattgaagtatttttaccgcaagctgtagacttgcttaaaccaaaagggcgtttgtctgtgatcagcttccattcgcttgaagatcggttgatcaaacagtttattcaaaaagaatcaactctagcagaagattctggttgggggatgcctcaacagcaggttgatacgagaagattaaagaaaatttcacgggttcgtgcgagtgaagaagaagtaaaagcgaacccacgttcacgtagtgcatggcttcgggttgctgaacgcttggaacaaaaaggcgcgtaatgaaaagcagtgatgaaatcgaaaccacagaaaataaagtggtcaaaaaagttgtggtatatgcagtcatggtggcattggtttttatcagtgccatgatggtggtatttcaagtatttgaataccgtcatgattatagagagttaagctcttatatgcgtgaacgtgatgacctcaatgctgaatgggggcgtttattgattgagcaacaaacatttggtgcgactgctcaaattggtacacgtgctgtgacacaattacgaatgttttcgccacctgctgcagaaacggtggtaatttctttaccgatgacctcagagcaaaataagtaaggccttgctgtatggtagataagcgaacaaagcaaacacgaaaaaaacagcagtctatttcggaaaaaccaagtcttgcctttgatatgtggcggttttatctgctctgggcggtagtgctactgtgttttgtggtattaattgcacgtgcattttatgttcaagtcattaataaagactttttgcaaaataaggccaatgccaatattttgcgtactgaacgtatagaggctatgcgtggagtgattagtgatcgccacggtgtacctttagcgattagtagtccaatcatgaaaattgtgattgatccgcgtgattattttgagaccaagcatttatatgatcaaattacggctgaactaaaacaagatccaaacaaccgtaaattaaaacgccagttaccagataaaaatttaaatcttgatgaacttgccgacgtggtgggtgttgatcgtgctgatcttaaaaaacagatgaatgcgcgtccgcgttctcgctatctggttttgaaaaaagaagtacctcctcagcaagctgacctcattatgaaaggtaatttccaaggggtgtatgcagaaaaaacttataaacgttattacccgcaacctcagccaaatgcccaaattattggtttgaccaatagtgaaggtcaaggtatcgaaggcttggaaatgcagttgaataagcaactgtcaggtgtagacggtgagcaaaaaattattcgcgataagcgtggtaaccgtttaaaagtttctgaggtaattcgtgagggtgaaccaggtgaaaatattactttaagtatcgactcacgtttgcagtacattatgtaccgtgaattaacggctgcaggtgtggctaacaatgcgcgttcagcaacggcgattgcagttgatgttaaaacgggtgaaattctggcgatgaccagttggccatcttataacccgaatgataagaatggcttatcaaataaagatgctatgcgtaaccgtggtgcgatcgatatgttcgagccaggttcaaccatgaaaccttttactatttctgcagctttagaaactggtcaatatacgccaaatacgattgtaaatacctctcctggctcaatgcgtttaggctggcatactattcgtgatacccataactatggggctttgaccgtaagtggtgtcattattaagtcttcaaccgtgggttctgcaaaaattgcattatcacttccgaaagaaactttgccgagcttctttaatcgtgttggttttggtaagcgttctgcagtaaggttccctggggaaagttcaggtctggttttacctgttaataaattaaactcttctcaaatcgggaccatggcatatggttatggcttaaacgcgacaatccttcaattggctcaaggttatgccatgcttgcaaatcatggtgtcaaaatgccattaagcttgcataaactagatcagccacctaaaggtgagcaagttttaaatccgaaaattgccgatcaagttttgttaatgcttgagcaagtgactatgccgggtggtactgcaaaacaagccaatattcctggttatagggttggtggtaaaacaggtactgcacataaattgcgtgcagatggtaaaggatattcaaataatgagtatcgtgccttatttgcgggtgtcgcaccaattagtgatccacgtttagccgttattgtagtggtggaaaacccacaaggtcgctattacggtggtttggttgccgctccagtttttgctcgtattatgcaagagtcgttgcgcttaatgaatgtgccgcttgataagccacttaatactccagaaaatcctattcgcaggtaagctatgactgtttcttttcaagaaattcatccaatcgaaattgatgctcaatggcctcaacagccatttcacggctttagtttagatagtcgtaaagttgaaacgggccaaatttttattgctttgacaagttatagccagcctgaaaaaacgcgtacatttgctgaagcggctttagcaaatggagcgttggctgtcattagcgaaaccgaattaggtgtagcaaatgaatgggtatgccctgatgtgcgtcagcgcatgggagagtggcaaaaacgttatttgcaacaggctgatgtagtaaaacctttacggattatagctgtaacaggcacaaatggtaaaacaacaatttctcgtttaattgctgagttaattagttcacagcagcagcgctgtgcagtgatggggacaacagggaatggtattttacctaacttaacgccttctacgcatactaccctcgacgctctacagttacaaaatgcgctacatgattatgctaaacagggagcaacttttgcttctttagaagcaagttcacatggtcttgaacagggtcgattaaatggttgcgatattgaaattgctgtttatagcaacttaagtcgtgaccatctggattatcatggcactttagaagcttatgcagaagcgaaggcgcgtttatttcagtttaattcgttaaaagtcgctgttattaatttagatgatgcgcatgctgacttgatgattaagtctgcccaaaataatccagcacaacctaaaattttgacttactcactaactcaaaatacagctgattattacattaccgatttaagctatagcttggcgggtgcaacttttaatttagtaagtcagcaaggttcatttgcggtagaaagcccattattaggtcatttcaatgttgaaaatttaattgccgcactcatcgctgctgagcaagctggtttcgatttacaggcattggttaattttgttcctaaactaattggtgcgccaggccgaatgcaagttattcgtgatgatgagcgattatttgtagtggattatgcgcatacaccagatgcattgattcaagtgcttaaaacattaaagcgtcatgtttcgaatcagctttgggcggtgtttggatgtggtggtgaccgtgaccgtggtaagcgtccactcatgactcaagcagctttggatggcgcaaatcctgttattctgacttcagataatccaagaacagaagaccctgaacaaatttttgctgacatgaagcaaggaatcgatttttcagggcatcgtatgcatgaaattcatgaccgccgtgaagcaattaaatttgttgcagagcaagctcaagctggtgacattgtagtgattgccggcaaaggacatgaaaattatcaagaaattaatggtgtgcgtcactggtttgatgatgtggttgaagtgcgttccgcgattgatgcccaacatcatacggtagatgctgcttaccctgcacaataggaaaaattatgcatacttcaaccaccagtaccgtgcctttggaaccgtggacagctcaacaattacaacaggcaacacagggttactggcataaagaccagatccctcaaagtgaaattaaacgtattttgactgactcgcgtcatgcagaaagtggggatgcctttttagcactaaaaggtgaacgtttcgacgcgcataattttgtcgcgcaagtggctgcaaatggttgccaagtcgctattgtcgagcggcctatagatgcagaaattgctcagcttgtagttgccgatacccgtttggctttagggcaacttggtgcgtatcgccgtgaacaaaatgctcaattgaaagtaattgctttaacgggcagtagtggtaaaaccaccaccaaagaaatgctaggaagtattttgtctcgtttagcacctacattgattacccgaggcaatttaaataatgaccttggtgtgccgatgatgttgcttgagcttcgaaaggagcatcagtatgcggtgatggaacttggtgcaaatcatcaaggtgaaattgattatacatcaaaaattgttcaaccgcatgttgctggcattttaaatattggaactgctcatttgggtgagttcggcgggcgtgatggcatttgccgcgctaaatcagaaatctatcgtcatattttacctcagggcgttgctattgttccgcaacaagatgactttaccgctgagattcgtgaagcagccaaaagccatcaaatcatgagctttggtgctggtggtgatgtctttgctacagagattgaattgttgccacaatctgccaatttccaattacatacgcctcaaggttcaagttttgtaagactgccgtttgcgggtgagcacaatgtgcaaaacgcaactgcagcagtagcatttgctttggcgttaggtgttagcttggaagatatcgtaaaaggtctagagcaagcacaaggtgcaaaaggtcgtttgaattttcttcaaaaagcgcctcatttatttattgatgatacttataacgccaatccaacatctatgcgtgctgcggcacaagtattacttcagcaaaatggcattaaagtcatggtgatgggggatattggggagttaggtgatagcagttggcaagaacatcacgatttaggtcgcgatcttgctgagcttcctttagaccatattgttgcagtggggcagtttgcctcagcagctctcgaaggcgcaggccttcattctactaaattgaaagcatttcagactcaagctgaggcgcttccatttttaatcaatctaatccaaacacatcaaccccagtccatgagtttcctgtttaaaggttctcgctttactcatatggaaacgttgatggctgatttgatggagaaactttaaatgctgttatggttgtttgaacaacttgcgggctatcacagttcgtttcaggttgttcgttatttaacattacgttctttactcagtgtattaacgtcactgaccattggtttggttctcggaccaatcatgattcgtaaattacaagcgttaaaatacggtcaggcagtaagttcgtttgctcctgaaaatcatgctaagaagatgggtacaccgacgatgggtgggattttaattctgctctcaattggtattagtactttattgtgggctgatttatctaacccttatgtttggattgtacttggtgtaatggttgtgttcggtgcggttggctgggcagatgactggattaaaattcgctataaagataatgcaggtctacctgcccgtaagaagtttttctggacttctgtcgcatcgctcggtgctggtattgcgttatatttaattgctacccaacaatctaatgcagaatacacagcaaatatgctggatttattgattcctttctttaagaatctttcaattccgctttctattgttcctttaggtttagcatttattgtatttacctatttagtaattaatggtgcctctaatgcggttaacctaactgatggattagatggtttagccattatgccagtagttatggtagcgacgggcttaggcgtatttgcttatttatctggtgatattcgttttgccaactatttgcatattccttatgtgaaatatacctctgaacttgtggtaatctgttctgccatgattggtgcaggtttggcatttctttggtataacgcacatccggcgcaagtctttatgggtgatgtgggcgctttagctctaggcgcaatgcttggaaccattgccgttatggttcgccaagaaattgtattcgcaattatgggcggtgttttcgttatggaagcggtatcggtattcctgcaaatcggctcattacgaatgcggaataaacgcgtatttttgatggcacctttgcaccatcactatgaaaaacaaggctggaaagaaacccaagtagtcatccgtttctggattattacgattatgctggttgttttaggcctaatgaccttaaaattgcgctagaacttattttggtgtcaatataaagccagtttctactggctttttttattggagaggtaaatgacaaaagttgctggtctagaccaattatctgtaattaatcaaaaagtagttggagagggcgaagtcttacctcaagttgtgcttaaagatggaagtcaggtgcaaacgggaactgtcgcgacgatgctgcataatattgaactctataatgcgggggaaagagggcaaattgaagaagagttgaagatcgcaattccaactttaattaaagtgggcttatttgatttgtttgaagtagatgaatggattaagggaacaaatgcaggccgtacatttgttggaatgcacgctaaggcttatttacaacaaaaagaacaagagaataattaaacgtgactacgcaaaatttaatgtgtcctgtgtgtcgtcaacgacttgagctggtaagcaaaacatggcggtgtgaacagggccatagctatgacattgcaaagcaaggttatgtgaacttacatgttgtacagcacaaacatagtaaaaatccgggagatactcctgagtctgtagatgcgcgccgtgcttttttacaaggtggctattatcaacctttacagcaagcagtagttcatttgctgaaagatcttaaagctaaaatggtacttgatattggctgtggcgagggctattacaccagcgcaatgcaacaggtcgttgaacagtgtataggtgtagatattgcaaaaaatgcagtacaacgcgcagcaaagttaaatgacaaagtgacatgggtggttggtacaggagcaactttaccggtcatcgatcaaagcatggatgtgtgtacgagtctttttagcccgattccccaaacggaaattctgcgtgttttaaaagatgatggttatttaattgttgtgactccagcaaccgatcatttgtatgcgatgcgtgaggcattgtttgaacaggttaatcctcacacaccacagaaatttgttgaacaactacaagatttatttgagttgaaagaacagcaagttattgatgctcctttagtacttgaccagcaagctttaaaaaatcttattgctatgactccctatgcttataaggcatctccagaacgtcgtatgcaattagaacagaaagcacacttacaagtgaccgcatcttttcaaatttatctttttcaaaagcgtaataaaaaagccatctaacgatggcttttttatttttattcaatttgattaatcaagttttctaattcatctttttcacgcttcggcgctgccccttgcgaaggtttcattgctggaggtgttgtcttggaaggaatcacaatttcctcacccggtaagtcatcgaagtcattattggtggttttaggttgtggtggtgcaggacgatagagtggacgtgctaatggaggggcagcacgatatgttttcttatcgcctacttcagttgtgacttcttgcttatcgcgagaaataggtgcctgagcatctttttctaaacgaacccaagcagctggtgtaccttgcaatgcttgtcccataaagttaatccagatcggtaatgcagcaataccaccatactcacggcgaccaagtgtagtcggctggtcaaaaccaacccatgttacagttactaacttgccattaaaacctgcaaaccatgcatcttttgcatcgttagtcgtacctgttttacctcctaaatcactacggccaatcttgagtgcagcacgacctgtaccatgctcaattacatcacgtaagatatttgccatatcataagcagagcttgattttaaaatgcgctgagcttgacgatattgactgttatttttgtccgtctgtttaaggttaagttgtttggttgtcttttctttctgctctagctctttatttgtaacttcaacaacttgatcgtctggagtagttacctgtgcatcgtcagttgtctcaggagcattaatacatggaatacatgcatattctggcttggcttcgtaaatgactttaccgtatgcatcttcaatacgttgaataaaatgcggttgaacgcggtaaccaccgtttgcaaatgttgcataaccagttgccatttgaattggtaatacttgaggcgtacctaaagcaatggtgtagttacgtggaatttgatcctcttgtaaaccaaaatccatgaataattggcgagtacgttcaattcctacagtttgtaagagtcttactgaaaccgtattacgagacaaatacaaagcacggcgtaacgggatcatgcctaggtagcgaccatcagagttcttcggtgtccacttgccaatcgtaatagggctatcattcaccatactataaggtgtcatgccacgttctaatgctaaagcatagaggaatggtttgatggtagaacctggctgacgccagccttgtaaagcacggttaaattttgattgatagaaattataaccacctacaattgcttcaattgagccatcgtttgggttaattgcaatgagctgaccttgaacttttggtacttgaactagtgaccacgcagttttagcttcatttgggcgtaaacgaacaatatctttaactttaacaatttgagatgcacgagaaggcgctgcacctacgctatttgcattgcgatagggacgggcccatgacatgccggaccattgcacggttactgttgagccatcttgcattaatgcttcaaaagagctgctatttaccttggtgacttgcgccggataagtgttggcatatgctctaaattcgcttaatggcttatcatgtgcttctgcaccacgccagccatgacgacggtcataagcttcaagaccgtcctgcacagctttttccgcaatcgcttggcgtttcgcattaattgttgtgtagactttataaccagaatcaattgcttgttcaccaaaatgttttacaagctctgagcggaccatttcacctgcgtaggggtgaatattatttaagtcacggttgggcatattcaaattgattggctctgcaacggccttttgatattccgcttgagaaatataaccaagttgaagcattcggcctaaaatccagttgcgacgttcaagtgcacgctcagggttaacaactggattatatttagatggtgctttaggcaagccggcaatcatggccatttgggcaatgctgagctcattaatgcttttgttgtagtaaatctttgcagccgctgcgataccgtaagcgtttttacctaagaaaatcttatttacatagaggcttaagatgtcttctttagataagttttgctcaatttttcgagccaaaaagatttctgttagtttgcgttttaatgttctttctggacttaaataatagttctttgcgacctgcatcgtgatggttgaaccaccagtttgtacatcagaacccgtaacactttcactcaaagcacggcctaaacctttaaaactaatgccgctatgttcaaagaaagaagaatcttctgctgctagaaatgcatgaataaaattaggaggaatttgtttgtattcaaccggaatagaaagtttgccaccgtattcagcaatgagttgattgtcggctgtatagacttgcaatggttttaaaagcggtgctttttttagtgaactcatttccggaagcgttggggcaatatagagatacatgccatagaatcccatcggaagtgagactaagataataataatgatcaaaaaaattggacgcacgaagcccaaactggatagctttttcatgataagtaagctttaataagatcgaatacaaactaattgtggtcagtatagcctttagacatgcggattgttagatgagatattgtatccgtgtaaaaataaagaccgagattattggtttgtaattttttttggggataaaaaaataataggacaatagtgtgctcaggttatatcgtaaacctaataaggggttaatgggtgtcgatattagttcgacttctgttaagttgttagagctctctgtcaagaacggtaaatattgggtagaaagctatgctttgatgcctttacccgaaaacagtgtagttgaaaaaaatatcttaaatccagaagcagttgcagaggctttggaacgggcgatgaatttagcaaatccccaaaccactcatgctgcaattgctgttccgacatcgacggttattcataaaactatcgaaatggatgcagatatgagcgatgacgaacgcgaagttcagattcgtgtagatgcggagcagtatataccgttccctttagatgaggtgagccttgattttgaggttttgcccgatcgtcttgcgaatccaaatcgtgtaaatgtactcttggtcgccacaagaacagaaaacgttgaaacacgcgttgaagtgcttgaattggcagatttaaatcctaaattggctgatgtcgaaagttacgcggttgagcgcgcttttagcgtgtttgctgatagcttaccgatgggtgcaaataccatagggattttagatatcggccataccatgacgacattatctgtcatgcaaaatggcaagattatttatacacgagagcaggtctttggtggcaagcaacttacgcttgaaattcaaagtcgttatggcttgtctttagaagaagcaagccgagcgaaaaaagatcgctctttaccagatgattatgaaattgaagtgctagacccatttctagatgcggtagttcagcaggcggcccgttcactacaatttttcttttcttcatcccaatttaacgaaatagaccatattttgctagctggtggaaatgcgaatattccaggccttgccaagcttttgcagcaaaaattaggttaccgtgtcacgattgccaacccgtttttacaaatgggcttttctcctcaagtcgacgttcaaaaaattgaaaatgatgcttcatctttaatggtggcatgtggcttggctttaaggagttttgattaatggcaacaattaatttactgccttggcgcgaagagctgagggagcaacgaaaaaaacaatttataacgttatgttttggggtggttgttttggggattacaaccgtatttgggggatggttttattttgaccataaattagatgatcaagagcaagcgaatcagctcattatgagcacaaatcagaaccttgatcagcaattaaaaacattaaacggcttacaggaacagcgtgatgccattattgaacgcatgaagttgattcaaggtttgcagagtcaacgtccagtagtggtaagacttgttgatgagttagttcgagtcacaccatcagctatgtatttaacgaaatttagccgaaccggagataagtttacgattgaaggtaaagctgagagtccaaatacagtagccgaactactccgtaatcttgaagcatctccttggtatcgtaatgcttttatgaactctttcttggctaatgaagagaaaaaagataaggctgcaagttctcttcttcctagggtggaagaccactatggtagttttgttgtgactgtcgatttgggggaaatgggcgtgaccacaacggatgattctgctaagccatctacaggtgaaagtgtgggggccgctaaatgagtcaagacgaacttcaagaattgtcattagaacaattatctgcaaagaaaaagaaatttaatctcgataaattccttcagcaatttaatacgctggatatgaacaactacggtagttggccaatatctgtaaaaattacgtgttggatttttattttctttgctgtgttagctttggggtatttcattgttattcaaccgaaattacaagctattgataatgctcaagctcaggaaagcaatttattaaacgaatttcgtgaaaaagactcgaaattacgtaacctgcaacagtatcaggtgcaacttcaagagatgcaggcaaatttcaaccagcaactagagcagttaccaaaagaaactgagattccgagtttagttgaagatatcaacttaacaggagtgaactctggattgaaatttaaaaatattcgcttggaagatgaagtaaagcaggaaatttttattgagcaaccaattgccatagaagcgaccggggactatcacgcatttggagcttttgtaagtagcatcgctgctttgcctcgtattgtaaccatgcacgattttactgttgatgtatcgccagctaaagataacaagtctgatattcctgtgctgaactattccattaaagcaaaaacataccgatacgtaggggcaacagatacatcggagcaaacaggcaaagctccagcagcatctgcttcaacgaacactactgttcagccgaaataggagagttatgatgaaaattaagcaaattactctttatgttttggcgtgtgctgtgcttgtcggttgtgattcaagaattgatgcagtaaatcaggaaatggccaatattcgtaatcagccgccactccctattgaaccagcaccgatttttactcctgtaccacaatttaattacgctgctcatcaattaaaaagcccatttatgccaagttctctagctgccgagctcaagattatggcggggaaacgggtttatccgaatttctcacgtgcgccgcaaccactcgaaagttatgcacttgaagctttaaatatgaaagggagcatgcgtaataatcgagggcagatattggccctgatccagacaccggatcagcagattgaacgggtacaagtgggtaactatatgggcatgaatcagggccgtattacccatattagtccaacccagattgatctggttgaaatcgtaccagatggtcgagaaggctatgtcgaaagaccaagaacattggtcttgattgggcctgcaccctaaaatttagggaataacaacgaaaaaatatttttaaagattatttaatttaattggggatggtcagacaatgaatcacgtattccgtcagttttctatgggggctgtagctattgcgattatgcaggctgcatctgcacaggtcagcatgaccaacattgtaccaatgcaaattgcaggtcagggcacagaaattagagtcatgtttaatggcttgccaccacaaccacaagcttaccaacttgaaaatccttcacgtttaatccttgattttgataaggcacagcaaggtttaaaacaatctaaaattagtgttgcaactaatgaggcaagttctgtagatgttacttcagatgaccagcgctcacgtttaactgtaaacctaaaagatgctggagcatttacaacacgagtcgaaggcaatactttcattttaaaaattaattctgctcaaacaagtaataagccgctacctgtggtctcagcacaaccacagggagtttcaaatattggctttcagcgtggtagtcagggagaaggcctggttgttgtagatcttttaggaagtaatacgcctgtagatgttcagcagcagggtagtaaagtcgttataagaacaataggtacaaaaatcccgacacatttagcgcgtcgcttaaatgtaaatgattttgcaaccccggtttcaagtatcgatgcttataatgataaaggggttggtgtaataactatccagtcctctggtagctatgaatatatggcctatcaggcggagaataagctcacgatcagtttgaaacgtccccaagataaaaatgttacctctttatataaaacgccaaattattcaggaaataaactttcattagacttccaagatattgaagtacgccgtgtgttgcaattacttgctgattttacaggcatcaatatggtagctgccgatagtgtacaaggtaatatcacactacgtttaaaagatgtaccttgggatcaggctcttgatattattttaaaaactaaaaatcttgataaacgccgtaatggcaatgtgatttggattgctccagttgcagaattgattaaagcggaagaagaagaagcgaaagctgttgcacaaagtgtcaaacttgcacccttacagactgagtatattcaactgaagtatgctaaagctggcgatattatgggtctcattacacaaggctcaaataatagtaatggcttacaacatacttctggtggagggacctcaacttcaaccaatttaaatactggagttgatagtctaggcaataatgtgggtagtttgcttagcccgcgtggcactattactcaagatgaccgaactaatactcttattattaacgatactgctcagtcaattgatcaaattcgtaaaatgattgacttgcttgatgtgcaagttaaacaagttatggttgaagcacgtattgtgagagcctctacgtcatttaccaaagaacttggtgtgaagtggggtattctgtcgcaaggtattaccaataacaacaatttgctggttggcggtagtgaaacaactttatggaatttacgcgaacctaaaaaagatgaaactacaggtgggtataaatatacgattgagcgcccagataacttaaacgtggatttaggagtttctaatcctgcaggaagtattgcttttggcttgattagtatgtctgactttatgttagatcttgaattgtctgctttacaagcggatggttatggtgaggttatttctacccctaaagtcatgactgccgataaacaaacagcgaaagttgcaactggtcaacaagttccatatcaatctacaactaactctgcagcaggttcaactgctacaacatcttttaaagatgctttgctgagtttaaatgtgacaccaagtattacacctgatggcaagattcaaatgaagttggatatttctaaggattctgtagcgggtgcggctccaaatggagagttgattttaaataaaaataatatcaacaccaatgtattggtagataatggcgaaactgtcattttgggtggtgtttttgagcaaacaactatgaattcacaaaccaaagttcctttctttggtgatattcctgttgttgggcgtttatttagaaaagatgtaaagtctgatgataaacaagagttgctgattttcgttacaccacgaattgttaatgacactttagcgagaaatcattaatatattttttaatgaaagcaattgaaataggtggcgccttgccaagcaaagcgtttgaaaccctaccaaatatttatttggtagggcccatgggggcaggaaaaacaaccgttggacgtcatttagcagaactattagggcgtgaatttttagatagtgatcatgaaattgagcgcaagacaggggccactattccctggatttttgaaaaagaaggagaagtcggcttccgtacgcgtgaaactgtcgttttaaatgagcttacttcacgtaaggcattagtgcttgccacaggtggcggtgctattactcaggcgcctaatcgggagtttttaaagcaacgtggaatcgttgtttatctatatactcctgtcgaattacaactacaaagaacctatcgcgataaaaatagacctttattacaagttgaaaaccctgaacaaaaattgcgggatttattaaagatcagagatcctctgtatcgtgaagttgcacactatacgattgaaacgaatcaaggtgctgcacgtgatcttgcccaaaagattttgcaacttattctatcgaacaagttaaaatagacgaactgactagtggttttataaattcatgcaaactttacatgttgaattaggcgaacgccgttatcctattttcattggtagccaacttgacccgaaacaattactagagccttatattcatggtcaacaggtcatgattgtgagtaatgttacggttgcacctttatacttaagccactatcaggaagctttggaaagtctaggtaaaacggttgcgacctgtattttacctgatggcgaaaagtataaagatattcagcatttaaacttaatttttgatgcattgcttgaagctggttttaaccgtgattgtacggttttagctttaggtggtggtgtcattggtgatatggctggttttgcttctgcttgtttccaacgtggcgtttactttgtacaggttcctacgaccttactttcacaagtagattcaagtgttggtggaaaaacaggaattaatcatccgcttggcaagaatatgttaggtgcttttcagcaaccacaagttgttttagctgacatggcacaattgaatacattgccagaacgtgagctttcggccggtttagccgaagtaattaaatatgcacttttgggtgatgaagatttcctggtttggcttgaagaaaatatggatggcctagttgcaagagatgctgaccttttagcagaggctgtttatcgttcatgtgctcacaaagcccgcattgttgccaatgatgagaaagagcaaggtgaacgtgctttacttaacttaggtcatacttttggtcatgcgattgagtcatatctaggttatggaacttggttgcatggtgaagctgtagcaactggaatggttatggcggcagatttatcacaacgtttgggttggatctcaaatgaagatgtggcacgtacaaaaaaaatcattcaacgtgcaaatttgccgatatcatgtccacaaattccattggatgatttccttggatatatggctcatgacaaaaaagttcttaatgggcaattacgtttggtgttgttaaaacaactcggacaagctgtaattaccaaagactttgatgttgaacttatgaaacaagctattttggcgaatcaacacggataacaaataaggtaaagcatgactgtatcacgtacactttggcagaatgttcaacaatatatctggttggttggtggtattgtctgcttattccttgcttttattttttgggtcataactgataataaaaaactggttgaggttgaaaagtcagctgattccgatgcacccgtacaaattcagccagagaaagttgcaaccactcctaacttaggtgctttagctgacgaggttcgtccactggatttaacaacgcgaactgtggcgtcaggtgaacatgagcctgagtttcgtggcacaaaatttattaatgaaaataaaaaacaatggacgcttgagttattcagagcttctgatgaagacatcattaaaaactttttaaaaagtcgtactgatcgtaataagtttatttatttccgcttaagcggagaacaacaagcagaacaatatgtgttggcttacggaacattcaaacgttcagaagatgcggttcagcaattaacacagattaatttgcagttacctgattcagttaaacctcagccacagcagttctcaagttatgccccactggtaaatgatttgggggcagatgagatgaaaggtggcaataatcagttatatgaagttagattgcgtccagcggctttgcctagaattgatgaatctttattaatgtctgctccagcgagtggtaccctaaacactcagccaaaacctcctagtactaactcggctacaaaaactactattgtacgtcgtgatgcggcaggaaatgtggttgatgtacaacaatcgaattctaatattgatcagccaaataaacctgcacagacacggattaatgagaatcaaccaaaaaatgctacaaatgagggcacaagagggaactaaatcaccttaagttgtgctctaaaatggtgcaaatataaggcgtattaatattttttgaccagatgtggtgcatatttagtcattttttcacatgataacgtgaataaaataattatatttataataaatataaagatttaggtctatttttctattttggcacactttttgctttattgttgtgcttattaatgtgctgcaaactattttagcctctaagaagtgaattctatgcagagtcgtggggtcgaactgctttaaaagagtgcgaaataagtcaaaacatttttctagcaaaaaccagtgtacgtaaaaatggaacagcgtatattggcttatccgcccaaaatttttttttgcgaaacattgagctaactatcgtccataggcactattgcaaaaagaagttgtttgtttgacgctcgaaagagccttattgaaagaagggtacgctatgcacatgccatcgcctaatactgtagctcccgctcaaggtttatatcagcctgatgagtttaaggataactgtggttttggactgattgcccatatgaagggtgaatcaagtcatcatctagtagaaaccgcgattcacagtttaagttgcatgacgcaccgtggtggtattgccgcagatggcaagacgggagatggttgcggcttattattggcgatgccaaagcaatttttccgtgatgaagcaaaaaaactgagtgatattacactgagtgaaatttttgcagtgggtacggtatttttaaatattgatccagcattagcacagcattctaaaaatattttaacgaaagaaattgagtcagaaggtttacgtgtacttgcttggcgtatcgttccaacaaacaacgatgcattgggtgaaatcgcgcttcaatctttacctgcttttgagcaagtcatcgtcaactgcccaatgggcgtaactgaggttgaatttaaccgtaagttattcttggcgcgtcgccgtgcggaacaacaactccaaaatgatccgttattttacgtgactacgctttgctcgacagttattagctataaaggcttaatgatgcctgcggcgattgccgagttttatacagacttggcagatgagcgtttaaaatcacatatcgtggtattccaccaacgtttctctacaaatacattacctcgttggccattagctcagccattccgttatcttgcgcataatggtgaaatcaacacaattacagcaaaccgtaactgggcattagcgcgtactcctaaatttgaaaacccattattgccgggtttgactgagcttaacccgattgtaaaccgtacaggttcggactcttcaagtttagataatatgcttgagattctggtgggcggtggtatggatttattccgtgctttacgtatgctcgtgccaccagcttggcagaacgttgaaactttagatgcagacttgcgtgcattttatgagttcaactcaaaacatatggaagcttgggatggtccggcaggcctcgttattcaagatggtcgtcatgcgatttgtatgcttgaccgtaatggtttacgtccagcgcgttgggtaattaccaaaaatgattacattaccttggcatctgaaattggtgtttggggctatgagccagaagatgtggtatcaaaaggtcgtgtaggtcctggtcaaatcttggttgtagacacccttacaggtaaagtgcttgatactaaagatgttagcaatcacttgaaaaacatgcgtccgtaccgtgagtggttgcgtgaccatgcgattcgcttaaatgcaaacccggaacttgaagaacaacttgttgataaaggtttaactggcgatgcattaaaagcggctcaaaaaatgtttatggtgacatttgaagagcgcgatcagttgttacgtccaatcgctgagagcggtcaggaagctgttggttctatgggtgacgatacaccaatggctgtattgtctcgtcaagtacgtcatgtgaccgattacttccgtcaacagtttgcacaggtgacaaacccgccaatcgacccattacgtgagtcaattgttatgtcacttgaaacctgtttgggccgtgagcagaacgtattcgaacaaggtcctgagcatgctgatcgtatcatcatctctagcccggttttatcaaattcaaaaatgcagcaaattcgtagcattgaacgtgcaggttatgaggcggttgatattgatctgaactatgctgaaaccgaaggtttacaagctgcgattactcgtatttgtgaagaatctgcacaagctgttcgtgatggtaagaccttaattgttttaactgataaaaacattcgtcaaggttatttacctgcaaatgctgcgcttgcaacaggtgcggtacaccatcacctcataaaaactggtttgcgtactgatgcaaacattatggttgaaaccggttttgcacgtgatccacatcaatttgcggtgttactcggttttggtgctactgccatttacccataccttgcatatgatgtaatcaatgatttgattgctaaaggtgagcttttaggtgatccaatccatgcacaggcaaacttccgtaaaggtatcgagaaaggcttattaaaagttctttcaaagatgggtatctcgacagtagcttcttaccgtggtggtcagttatttgaagcagttggtttatcttctgaagttgtagatcaatgtttcttaggtgttcctagtcgtatccaaggtgcaacatttgttgatcttgaaaatgaccagaaaaagttagcggctacagcttggtctaaccgtaaaccaattgatcaaggtggtttgctgaaattcgtatttggtaaagaataccacgcgtttaacccagacgtgattaactcgctacataaggcagttcgttctggcaaatacgaagactttaaagaatatgccgagttagtgaataaccgtccgatcgcgactattcgtgacctgtttaagttaaaaacaaccaatccaattccggttgagcaagttgaatcggttgaagctatcttgcctcgtttcgactcggcagggatgtctttaggtgcactttctccagaagcccatgaagcaattgcaattgccatgaataccattggtggtcgttcaaactctggtgagggtggtgaagatcctgcgcgttacggcacaattcgtaactcgaaaatcaagcaaattgcatctggacgttttggtgtaacacctgcatatttaacttctgctgaagtcttgcaaattaaagttgctcaaggtgcaaaaccgggtgaaggtggtcagttgccaggtggtaaagtgaatggcttgattgcacgtttacgttactctgttccgggtgtgacacttatttcacctccgccgcatcatgacatttactcaattgaagatttgtcgcaactgatttttgacttgaaacaagttaacccgaaagcaatggtatctgtgaagttagtatctgagccgggtgtaggtacgattgctgcaggtgttgctaaagcatatgcagactttattaccatttcaggttatgacggtggtactgctgcgtctccgctttcatcaattcaccatgcaggttcgccatgggagcttggcttgagtgaagcgcatcaggcacttcgtgtaaatgacttgcgtggcaaagtacgtgtacaaactgacggtggtttaaagactggtcttgatgttattaaggcggctattttaggtgctgaaagtttcggttttggttctacaccaatgatcgcattaggttgtaaatacctacgtatttgccacttaaacaactgtgcgaccggtgttgcgactcaacaagatcatttacgtcaagagcactatattggcgaaccacaaatgctcattaatttcttccactttattgcagaagaaacgcgtgaatggttggcagctcttggtgtagcttcacttaaagacttgattggccgtgtagatttacttgaagtcttaccgggtgaaacagagaaacatgctcatcttgatttaagtgcattattaacttctcatcctgctgctgaaggtaaagcacagtattgtgaagtagaaggtaatgcaccgtttgacaagggcgtattggctgaaagaatggtcgaagaaatgcttcctgcaatcgagtcaagcgctggtggtcaattcaattttaatgtcgtgaactgtgaccgttcaattggtgcacgtgtatcgggtgagattgctcgtcgctatggcaacttgggtatggaagcacatccggttgtaatgaacctaacaggtactgctggtcagtcacttggtgtttggaatgctggtggtttgcacatccgtcttgaaggtgatgcaaatgactatgtaggtaaaggtatggctggtggtcgtatttcgatcttcccaccaaaaggttcacctttccaaacacaaaatacagcaattattggtaatacttgtttgtatggcgcaactggcggtaagttatttgctgcaggtacagcaggtgagcgtttcgcggttcgtaactctggtgcgtttgctgttattgaaggtgcaggtgaccactgctgtgaatatatgactggtggtgttgtgactgtgcttggaaaagtgggtcataactttggtgcaggtatgacaggcggttttgcttacgtgcttgacctcgataatgactttgtagattactacaaccacgagttaattgacttaacccgtatttcaacagaatctatggaagatcataaagaattcttattgcgtattattgacgagcacatcaaggaaacaggtagtgcttgggcttataaaatccgcaatgagttcgatttctacagccgtaaattctggcttgtgaaacctaaagctgctaacttgcaaacgcttttgaaaacaacacaagctgacccacaataattccacgactgcaaagacataggcaggtgcgggcaacaaggaaatccgcgcctacccacggagagagacatggcagagcgcctaaataatgactttcaatttctggatgtaccacgtcaagatccagagaaaaaagatattactgtccgcaaagcagagtttgtggaaatttataaaccttttacttcggaaactgtaaccaatcagacgcaccgttgtttaggttgtggtaacccatattgcgaatggaaatgtcctgtacataactacattccaaactggctaaaactcattgctgaaggccaaattttccaggctgctgagctttgccatcaaacaaatactttacctgaggtatgtggtcgtgtatgtccgcaggaccgtttgtgtgaaggtgcttgtaccttaaatgatggctttggtgcagtaactattggtaatgctgaaaaatatatcaatgacacggcttttgctttgggttggcgcccagatatgtcacatgtgaagtggacaggtaaaaaagttgcaatcattggtgcaggtccagcaggcctaggctgtgccgacattttagctcgtggcggtgttaaaccggtggtatttgacaagcgtcctgaaattggtggcttactaacatttggtattccagaattcaaaatggaaaaagatgtgatgaagcgccgccgtgaaattttcactggcatgggcattgaattccgcttaaatactgaaattggtaaagatgtcacgattgatgaattacttgctgaatatgatgcagtattcatggggatgggaacttatacctacatgaaaggtggtttcccaggtgaagaccttgacggtgtttatgatgcgcttgatttcttaatctctaacgtgaaccgttgtcagggatgggaaaaggacccaagtgaatacattagcatggatggtaagaaagttattgttcttggtggtggtgatactgcaatggactgtaaccgtacttcattacgtcaaggtgcccacgacgtaacatgtgcataccgccgtgatgaaagtaatatgccgggttctgcacgtgaagtaaaaaatgcgtatgaagaaggcgtaaagttcttatttaaccgtcaaccaatcgagattgttggcgaaaatggtaaggtaacaggcgtaaaagtggtaacgacacaaatgggtgaaccagatagtcgtggtcgccgtagccctgagccaattccgggttctgaagaagttttaccagctgatgcagttttgctagcgttcggtttccgtccaagccctgctgactggtttggtagtgtgaatattaatcttgatggttctggtcgtgttgttgcacctgaacagcaggaatttaaattccagacttcaaacccaaaaatctttgctggtggtgatatggtacgtggttcagaccttgtagttacagcaatctgggaaggtcgccaagctgctgaaggtattttagattaccttggtgtttaatctaaaaaatcattattaaagtttttgataaagcctgcgatatgcaggctttattttttttaccattagtcagtttgatgcttttggcaaatacaataagcttttttgccctgtttagccccttagtcgcaagagatactcaaagcttccttcttcaatacaataggtgttgaatatgaatatcgcaggtatgacggcagaaaaatcatatttaaatcgtcgaaaagcgttgggtattattgtgcgtcgccttgagtttaatcctcaagctatcaaacgctattattttgcaaattcgcctttaatgtcccattttttaactgcactctcttcaacatttcccgtaggagaacagttttttgtaaatagcgtgcgtaatgtacgtgacaaagtttccgatcctcaactacaggctcagattgcggcatttattgggcaagaagcaatgcattcgaaagcacatggagagttcaatgaggcttggcgtcgtgatgactataatctggatcgctttcaaaactggttgaatgagcgtgacaaatatttaagaacaatttctcctaagctgcagctagcactgacatgtgcatttgagcattttacggctttgctggggggatatattttacagcatccagaacttctaaaaactttggatcaagatgcgctaaagctttgggtttggcatgctatagaagaaattgagcatcgttcagttgcattcgatgtctatcaacaggtatatggcgatgaccgtattcgtcgtttactcatgcggagtgttactacagggtttgcaagtcttgctttttatggcactacacggctattttggcaagataaatggaagagcttgcctaaaatcggaggtaacttatttgggctatatttgcttgctaaaatgcttatacagctaactcctgaatattttgcttattacaaaaaagacttccacccgagtcaaaaagattatggccatatggtcgattattggaaaagttatttggctgatgaatatcaaatggcaagtttccaagaggaaaaaaatccaagaccaagctaataaaaaaccggatttaaaaatccggtttttttaaatctataaaataaaagcaacacaataatgccaaaatcgtcatacaatcgggaaaagtggttaaaaatataaagaaaaacttgaggataatgtgacgatgaaaacgtttaaacaacttgctatcgcgacaacacttgccagtaccctattattttcaggctgtggctataatactttacaggttaaagatgaagctgtaacagcggcttggtctgaagtacaaaaccaatatcaacgtcgtgccgatctagttccaaatttggtaaatgttgtaaaaggttatgctaaacatgaagaacaggttttaacagaggtcactcaagcacgtgccaatgttgcaggcttgaaggttgataaagaagtattagaagatccagcattacttgaaaaatatcaacaggcacaaagccagttaactggggcattatctcgacttattgctgtttcagaaaactacccggatttaaaagccaatacccaattccaagaattgcaagttcagcttgagggaacagaaaaccgaattgctgttgcccgtaatcgttatattacaactgttcaggactataacgcttatgttcgtcagttcccacaagcagtaacagcaaaagtgattggcatgcatcctaaagccaatttctctgcagaagcatctgctcagcaggctccaaaagtttcttttgattaatttaaatcaaaggagtgccgcatgagaaatactatattgcttcagcctaagcaaattagggtattcgttattaccttaattgttctctgctgtggtgttctgtttcagaatgcggcttggagtgagaataatattgccactgctaccgatgaaacggatacggtagtggcaggcaaaattattcaacagcagcaagctcaagcatctaagcctcaaataaattctcaggcagcttcgagtgtcacacctcaaacgcaagttgcaaatgatatggctgatggtgaatcaattcgtggtttaccaacattaaatcaacctgtcattgatcaagctaacgttttgagtgaaactgaaaaacaacagcttagccagaaaatcttaaatctgtaccagcaaggtaaagcacaaataggtattgtgattgtaccaactacaggtcaagaagatatttttgattatgctttgcgagtaggtgaaaaatggcaactcggttcgagtaaacgagataatggcttacttatcgcagttgcaattaatgaccatagaatacagattctaactggatacggtttagaaggggtattacctgatattgttgcaagtcgaattattcgaaatcaaattaccccttattttaaacaagcccaatatgctcaaggactaaatgcaggacttgatgaaattggaagaattttaaatttagatccggaagttgctcagcaagctgctcaagatttaaaagaacgccaacatcaagctgccgaagaacaacaagccaaacaaacaacgcttacaatggctttatttattcttgttgctggggttgtgggatcatttattgttggtcgaccacttagcgcgtcaacagcaggagttgcggcagcggtagctggttttgtaaatggtgctggcgtagtaatgagtttactactgggttttggtattttctttttactcataacttcaattgcccaactgattttacaggctattctgagcggagctggtggcggtggacgcggaggaggctttggcggtggtggcggaggctacggcggcggcggtggacgttttggcggtggaggtgcttcaggctcatggtaacaacatcagaaacaacccaaattattactcagccaaaaattgaggaatatgtagagccaagtttaaaacgttggtttaagcatttttgttatttaccagcaagtagcaaatatttctccaaacaagataaacaagctattgctgaggctgtacagcaagcagagcatgggcatgttggcgaaatacaggttgtcatagaaggccatatcccatgttcacaagcgtatagacaaaatacccgtttaagagcccagcaattatttgcagaactgggtgtttgggatacagagctcaatagtggtgtattgctctatttaaatttgtgtgaacgtacagtagaaatcatctttgatcgtgggattagaaatgcaactactgaacaaatatggcagcagatttgtaagtcgattgtagagcagcttcaacaaaagcaatatcagaaagcagtagttacaggagttcagcaaattggagaagtgatgtcacgcttttacgatgaaaacatgccagatcaattaaatgaattaggtaacgcacctatcattattaattaaatgattgactcaaaaatttagttgtttttttaaatttttgctcaataaggtggctgacaaaaaatgtcacctatttgattatttttatagagatttttatcacattcgatattaaaaaaatgaaataggcaataaattaatttttatcggtgatttaattctactaaattcctagtgacaatttttgtcagttaattacagcttaaactactaaaataaggctttataaattataagtttatgttttttaacaataataaaagttggcatggttgctgcaatatatttgatagctgaaaagcttatataaaaacatacatacaatctttggggaaaaggctatgaatgcacaaaaaggttttacattaatcgaacttatgatcgtggttgccattattggtattttggcagcaattgcgattcctgcttatcaaaactacattgctaagtcacaagtaagtactggtttagctgatattactgctggtaagacaaatgcagaaactaaattagcagaaggtttaactgcggcattaactgatgtaacaactttaggtttacaacaatctacgaatgcttgtgctattacagccaatattggaactaatggtgcaagtaatattacttgtacattgaaaggtacatcacaaattaatggtaaaaaaattgaatggatccgtgatgcagataatgctacaaatggtacgacaggtgcttggcgctgtaaaactgatgtagctgaaaacttacgtcctaaatcatgtggtgcttcttaatagttaattaataaaaagagaggttgcggcctctcttttttattgaagaaaataaatatgttaaagaaaaatattttactgtttgtgatagtaatctatcttattacagcactattgggatatcgaattggctggtctgtctttcaatatgatgaacttcgtttattgcagtttcctttagcgttatgtgctttattaatattaatctccgcaaaaaaactaaaatactcaatttatagtcaaattaatttttttattattggggtatttatattaattcaacacataaattggggaatttttgagtttcaagagctttggtctgcgatagcattactttttatattttctgccttaacatatgagttaaggaatataaaaaatatagagcatggtattgcactaattgtagttacagcaattattccatgtttatttattttgatttctatttttaattttattatccatcaacaatggtttgattggcagtttaactctggcacgattcggatttatgatagtgttattgttcccttgtttttcttcctgatttatctaaaaaataagaaatatccttatatctcttatttttaccctatagtaattttcttttttgctttagcatggttttttgatggagctaggtctgctttacttgcggtaatgacaggattgctagttctctttatatattctaaagaaaatcgaaagcttattttgcaaagctgtatttatatttttttagctttttttatttataaaatcactatttttttagctgaaaaaaatacaatgactgtaatacgaacgggaacatcgctgcgcgcagaaatgtggaagtttgtatttaaacaatggaaacagcacccatttactggggttggtggtggatacttgtctaaaatacagtatgcgtatggacatcatatacataatctatatttaagacttatttttgaatggggcattataggtctcatattctgtatatggatgttgacccaattaattggtttatttaaagataaaactgtttcactaattttgaaagttggtgtgatcgccgttttagttgatgcaatgttctcaggtagtatggtgtacccagcgtcacaaattgcctgtgtattatttatagcttttactttttctcatagagagttaacttctagttcccaatattcttctaggtcgacaaaaatactgattgctttatggggagttttattcttatacatcacaataatgtatttagggcaagatttaacttgttggagttgcggaagctatggaggacgaatggctccaaacttttggttttatggtggtgcggagcacttagtaccagcttcaaaaattccttaacttttgaagtaaactttatcaagtccttttcatatagacttcatacatttttctttagggttccatgtataatttcacccatttctaatagtctcaaacctgtcactatgcaagtattctttctgttcctcgcagcaattctattgggtttcgcatggctatcaccatttcactataacccttgggtaatgttttctagtgaaatgagtacttttgcggcaggtttaagtgtcttagctgcacttttttatcaaaatattaaaattccgcgtgcacaattattgctgttgccatttattttaattccagtggtgcagtgggcttttggtctagtttttgattttagtacagctttgttaagttcactttacttattaggcttctggtttatggttgtggcgggttataacttgtcactagatcaacaaaagcgagatcaaatttttacaggctttagtttattactgattattgtatcaattgcgaccagttttattgcgatatgccaatggttaaatattgagtctcattttgtgcatatgttgcatttaattggtaaccgtccttacggcaactttggtcaacctaacaatatggcaacctttctgattatggggctattaggttgtctatttttatatgaaaagaataaagcaacagtttggttacttttcccttctgcactcattatcttgtttacaatcgctttaagccaatcaagaacgtcttgggtcgtttttccatttttacttatctattggatagttaaactatttggaaaacaaaaaagatttggttttattcaagggttcttgtggtgcgctggtttttttgtaatagctggcgtgattctgccatttgctactagtttaattgaagcatggtcgagcgctgatgtagcccaagcaagtagtttagttgaaagagcaagctctggatatctacgttttaatatctggacccaaatgctacttgctgtacagcaacatccttggttggggtatggttggaaccaaaccagtgtagcgcaaatgtcagcctatgctctttttccaacaactgagtggacgaccagtgcccataatattttattagatctcatcatctggaacggtatcccaataggtatagccattattgcttactttgcatgttggttcctttggctaaaccagcaggctaaagaaactatctcaattattgcaattatgatggtgtgtaccgtactcattcatgccatgttagagtttcctcaacgctacgcttacttcttacttacttgtggattcttattaggcataattcaggcacagacacctgtactcaaaggtattgtgctcaacaagcaggttcttcgtttaatttggggagtcagtttaatacttctgctagcaatttggcgtgactataatgtctatgtcacaaatagtaatttgttgtttaagaataaacagccaaatgctgaggttttgggaagtaatcagatttttgttttaacgcagtttgagcagcgtctaaaatggattgagatgaagcctgaaactactttatctgatgctgatttagcagtgtggggtaattttgtgaagaataaagcgacgccttataacttgcgtaaatatgcccagctacttgcctataatggaaaagtagaacaggccgagcaacaaatatttattttgcagcatctttatcgacagcaaataactttggcagagttgttaaaagataaataaaaaaatccccttgaatacaaggggatttttttatgagaaattacatttggctttgaatataattttcgataccaacactgccaataagatcaatttgagtatctaaccaatcccaatattcttcctctttttctaagatttcttgtaccaaatcacgcgttacatagtcttgttctgtttcggctaaagcgaccgctttttgaattgcttcaatattttcttttactttacggatgtcgcattgcagaacttcttctgtatgttgaccgatatacaatttacctaagtgttgaagattagggagaccttctaaaaataagatacgctcaataattttgtcagcatgcttcatttggcgaattgattctttatattcggcagaaccgagttgttcaattccccaatcattaaacatacgagagtgtaaaaagtattgattaattgcagttaaatgatgatacagcacttggttgagctgattaatgacatcacgattgcctttcattgtagctactccaaaacaatttctgccttaattcagttaaggcaatctataaattcattttagtgaacaatcatggatatggcgagtaatttatagaacagcaaatgaaaatcgcaatcaaaaacaacacaatattggtaaatgtgaatttccttccaaaaaaaaccgcttcaatgaggaacatttaacgttccgcaaaaagcggtggaggagtcaataaatttttgttaattattaatttttattatgcagctacagaaatgcgcgcagcaatttctgctaattcttcactaataatagcacgtgcttctggtgcacagcgtccacagcaagtaccaagatcaagcaaatcgcgaatttcacgatagctttcagcgccattttcaatagcgtctttaatatcctgatcggtaatgccacgacacaagcaaacgtacatgggagtgatccccaaatataaatgcgataattgatattattgataattattatcgtttgtcaatgaaattcatttaaaatctcatttatcgttattgggattttggataaaaaaataccacctaagcggaaatctgagagttactcagctttttaagctggggtggtatctaattttagagctaaataatttctagttaatattttatcttactgattaataataacaattccatccatttcaactaaagcccctttaggcaggcttgctacaccaagtgcagcacgagctgggtatggttgagcaaaatattcgcccataatttggttaacgagttggaaattagataaatcagtaagaaaaatattgagctttgcaatatctgcaagtgtgccgcctgcagcttcacatactgctttaaggttatcaaaaacacggcggatttgagcttcaataccgtctacaagttccatactgtaaggatctaaaccaatttgccctgataaatatagtgtgttacctactaaaatggcttgagaatatgtgccgatggcagcaggggcattttcagtatgaatgacttgacgggacatttggttctccttgattaaatcttttttcatcataatcgatgatacgttttgacaaaagtatcatcgatttaattgattaggtacttctagaagttagattttagtaaagcagaacaaattttagctgactttggaaatttccatttgtggagcaggggcgtctagacgctcaatacgtgggaagccatagtgcattcgtaaatcacgaatgacttttgcaatatgtttacggttgtttactacaatattgacgaaagtacgctgttcgttggaatgtaccatttctaccccagcattatttttacgacattggtagatgaggtctgatacctgttcatcattcattgccatataaatcgcaaggtaagcagtaaaacgtacatcatctacgtcatctgctttccattgaagcggcataatgttttctgggtgtaaatgttgttcatgaagcaaattatgacaacgaatacggtgcacaattaaaccacgtcgtgttaaatggccttgaattggatcgcctaaaataggattacaacagtgggcatatttaacatcaatgccttcagttccttgaattagtcgatctgaattttctgctcgaggatgcttgtcatttgcaaacaaatggttagctacaagttgaggaagtaaatctccaacagcaatttgctcaaataatgcatctttattatcaatatgacgccattgtaaaagatctaaccaatctgcatctgaaaggtcgttaatagaacgattaaagagtttcaaagctcgtgaaagtgcttgggcaccaactaaacgttgttcttcaatatcttggtctttgagtacgtgctgtaaagcacggcgagctttttgagtattaataaagctcagccaatctggatttggcgttgctaaaacgtcagtaataatctcaataacctgcccactaactaatggtgtagaaagtggcttaatttcaccatcaacttttgcacctaccgcatggttgcctaagaaaagactagctgagtaggcaaaatcaactactgtggcgccttgtggtaattcatgtaactggccgtgtggtgtgtaaacccaaattttttcttgatgcaaataatcaagtaagtcattaaaagtcgttttagcgcattcaccatcaatgagtgtatttaggttctgcatggaagcttgaatggcagagcggcaagtttgtggagcattttcgccgagtacgacaccgaaacgtgcagctttacgcatcaactcagtttgaatagtgagcgataacgtggttttttcacccttaagcttgatcattagtgactgattaccacctggtaacgggcggcggatatgatcttgatattggatgacctgaaaattttcttttaatgctgctactaaacgatcgcagtctgcaatggattgtaaaacgatttcaaaggcatggctatgagtaagttcttgtaaatccatttcattttttacgaaatggcgtaagagctcaatattattatttttctttttaattcgaccttgaatatgataattgtggagaagctctgcaagattttgttcccagatactttggtatttacatcgctctggtttggtttgaagcaacgcattttgaacgttatcaaacatatctaaatcgagattttgataacataaattttcaaggttatcggccatttcattcatgccgactaatcttgccatcggtacgaaaatatcaaaggtttcttgagcaatacgagcacgtttatcgggacgtaaggcgcccaatgtggtcatattgtggtagcgatcagctagtttaataataatgacgcgtggatcttgcaaagtagcttgtagaatttttctaaaagaagcagctttattatattctttatcgctcgactggcttagtttggttacgccatcaacaagctctgcaactgtttgtccaaatcgctcaataatatcgtcttttgtatattgagtatcttcaatgacatcatgtaaaagtgcagccattaatgtttcaggatccaggcgcatattcgctaaaatacagctaaccgcgataggatgcagaatataaggttcaccacttttacgggtaataccagtgtgtgccagatctccaaaatcgcaggcagcaagcactttttcgacttcacttaccgataagtaagggtcgataattaatttgagctgttgcttggcttggctgacctcttcgcctggcatagaccaccctttttctgttgcttaaaaaactaaatctatctacttcttaatgaaaagcatattgcggaacttgtcaattttttcgtttgaaaaagtgtatttttttttcaatgaaaataattgcttttaccaatatgttttaaatatgcaaagccaaataaaaaaccatcgcaaaaaaacgatggttttttatagaaacaggagtaattagaaagaaaaaccttctaaatttaagctgtttgtagaaagggcaagatcaagactagaagtttgataatcttgctcacgttgtttaagaatttctttcgttacgtgacctacagcgatttcacgtaaagcaacaactgttggtttgtcgttatcccattctacagttggctccatgccttgacgtgccaattgacgagcacgtttacttgcaacgagcacaagctcaaaacggttgtctacatgatctaaacaatcttcaacggtgacgcgtgccataaaagttctcgttttggaatggtaaatttgaacagactaaatagtataaaaggctttcgttccagactcaagttattcctgttttggttgtggagtaatcaagtcttgaattagattttgatgtctttttgcctgttgagataagactaaacgatttgctgtaatgacggcttcaagctcatgtaaggctttattaaagtcatcattaatgatgatatagtcgaaatttacatagtgctgcatgtcttcaacagcacagcttaagcggtgttcaataacttcaacagagtctgtaccacggttagataaacgttgacgtaaatcgaattgagtaggtggtaaaataaagatctgtttagattcaggaaacagcttacgtacttgctctgcaccttgccagtcaatttcaagcaagacatcatgtccttgagctaactgttgttttacggttgcttgcgaagtgccatagtagttaccaaatacttcagcatattcgataaatccaccttggttcacttggtctaaaaattcatcttttgttgtgaagtgatagtgaacaccatctaactcacctggtcgttgacctcgggtagtatgcgaaactgaaacatgtaaattgctcacacggtcaagtagggctttcaccaaagatgttttgcccgttcctgatgcagcagaaacgacaaacaatagacccgacatgatatttttcctgatatgataaaatatcttcgctattgtagtgtaccgtgcgtttaaactgaatagttttaactgcaaatatttacgagaagttcccctgttttattaattttgaggctgttatggaaattgtgttagctaatccgcgtggtttttgtgccggtgttgatcgagccatagcaatcgtcaatcgggctttggaatgttttaatcctcctatttatgtacgtcatgaagttgtacacaataaatttgtggtagatgacttacgccaaagaggggctgttttcgttgatgagctggaccaagtgccagatgattctattgtaattttcagtgcacacggtgtttcaaaagcagttcagcaagaagcagagcgtcgaggcttaaaagtttttgatgcgacttgtccattggtgactaaagtacatattgaagtaactaaatatgctcgcgaagggacagaagctattttaattggtcatgaagggcacccagaagttgaaggtacgatgggacaatatgacaaattaaaaggtggcgatatttatctggttgaagatgaggctgatgtggcagcactcgaggttagacatccggaaaaattagcatttgttacgcaaacgaccttatctattgatgatacagcaaaagtgattgatgctttgcgtgcgaaattcccgaatattcaaggtccgcgtaaagatgacatctgttatgcaactcaaaatagacaagatgcagtacgtgacttagctgaaaaatgtgatgttgtgctggttgttggctcgcctaactcttcaaattcgaatcgtttacgtgagcttgctgagcgtatggggaaagctgcttatctagtagataatgcagatcaacttgaacaatcatggttcaatgatacttgtaaaattggtgttacagcgggagcttcagctccagaaattttaattaagcaagtgattcaacgtttacaagattggggagctcaggcgcctaaagaattagaaggacgtgaggaaaatattacttttagtcttcctaaagaattacgtattcatgtgacccaagcataaaatgtgacttatttaacatactgattttaaatagttaaacagataattgttaacatgacagttatctgtttttttataccctttgtctgttttgtatttgttttgtaatttgtaaaagtaaaatttaaataagaaataaaaaattttagttttatttggggttctggggatgaggggaattattccacaagaagggttcaccttggtcgagctaatggtgacgattgcggtcatggctattattgcactgatggctgcaccatcaatgtcaaatttattagaaagtaaacgtttagatgctaatcaaagagacttaatcaacactttatcagaagcgaaaagtcaggcaattttaggacgtcagaatgtttctgttaacttgaactcaacagcttcaaatacacccacttcattaaattggcagacagcttctaataatactcttgagctaaaaaatatagccgctgatggtacgcaaagttctttaacgactactactttagcttttaacgcaaatggagtagtggcaaatataactcaagatacgcttttatctatttgtaattctagaataaataaaaagaaagtcattattttgtccaagcttggcactttggtttttaaggccgaggagaattgttaatgcatcactataagcaaaaagcccaagctggggtgggcttactcgaagttttggttgccttaattttacttgctattggagttttaggttatgttgccttgcagctaagagctatggatgcatcttcagaagcattaagtaaatctcaagccattctagtgatgaggggattagcagaaaatatccgtacaaatagtactcaagctagccagtatcctacatttgtgcgtagttatagcaactatacatctgatactcctgcacccacgtcatgttttaactctctatgtactgcctcccaactcgctcaatttgatgcctatcaagcagctagaaatgctaatcaactgggtatgagaattacgatgtcaaattgccctggcgttacaaatacaatggtgcaacaacgccagtgcctatttgtcttttggggtagaactgcgccagtgattactacaaatggaacaaatactagtgtggatgtttcaagttgtatgagtaataacggtgtttacgtgaataattcaacttgcttaatgatggaggcatattaaatggctcaatcatttatttctaataaagaacaaggttttaccttgattgaacttatagtcgccttagctttaggcctaatattagtggctgctgcaacacagctatttattggagggcttttatcgagccgattgcaaaaggccaatgctgaaatccaggacagcggtatttttggtttggaatatatggcacgtgatatacggcttctaaattatggaaatgttgtaaatccacaattaacagatacaacgccttggggaggtattgtattaacaggttcaacagcaacaaatgccaacaatattaattttattccaaaagttgatacaaatacttatattccggaagcgttattaagccgtggtgcaggtgatacggtaagtacagtgaataactactggaaaggtctttcaaatatacagaatagttcaaatgctgaagtacaaagcgatcaactgactattcaattcattgccccgaccaatatgactaattgtgaaggtgtgaatgtgttagcgggggacctaatagttcaacggtattttttacgtgttgataataatggtagctctcaacaggattatgcacttgcatgtgatgcgaatacccctgcggttagtgctacagcgcaacctgatatcgttaatggattaggagatgcaggccaaattatactgcctcgtattgaccattttcatgtcttattaggtgcgaaaaacgcagctggtaattttgcttattacacaattcctcagtatcgggtggctgcacaagctgctcgagatgcgagtccagctgtggctgctccaagaattctgtcaatacaaatatcggtattagcccgttctacaaataatgctcaaaataaggcaatagaccctaatcagtcttttcttatgctagatcagaatgtgcatgctgccgataacagaactcgctttttgcgacgcgtatatagcgtgacaattgctttacgcaatgcaatgggggaaacaatatgacccatttaaattataaaaatattaaaggtcgatctaaggaaacgggtgccacacttattgttgtacttattattttattgattgttatttctgtcggggttttggcaataagagtagcgattgtttctctaaaagttgcaactaatagccaagttggccaattaaactttcaatcttcagatactccgttagagcttattgtacagatgaacccaaccacattgacaaatattaccaatgtgattggagcagcactgaaagcacatgaaagtaaccctggtgcggaatataacttttgctataaaccaacttctacatctgtaagttttgctcaaactcggggggcaagtttgcttcgagctggcagcgctaataatgctgtggttgaagatggtggagtagcaggtttctgcgatttaacaagtgactatgggagtaatcgtcaagcggtagttactcaagttgctgtcagtatcccaaccgatgccatggctgatattccgggttcaaatctacctcgggacataaatctttccgaaggaacccaacttcctaaaagcatgctatctacgcaacgtatccgggttattacaacagcgtttttacctgcttatgcctcaacttctttagaaactctgcaatctgattgcttaagtacgagttccgcaaaaattagtgacaactttgatagtgcattaacggataagcaaactctagctgattgtttggcaaaccataatgtaccttttagtactcaagttcaagaatttaactataccaataagctgactgaaatcacggcaccaggttcataatggggaatatcatgaaactaaaattgaagaattttaagccaaataatttgtggtatgccgtctattcaagctcaatgatattcacatggctaatgacaagctctgtggtgcaagcaagtgatttacaaatttatgcctcacctacagcaggtaaaaaaacaattgtgatgatgttggatacatcaggaagtatgaccaacaatagttatggtgaaaaccgcttagccatgcttaaaaatggtatgaatgcttttttggctagcaataaccctgtcttaaatgatacgcgagtaggtttaggaaatttctcggcaaatggtgatagccgaagtggacaaattttagtggctgctgctcctttaggtgatgcaagtactttaaatacggtaggctcacaacgttataaattaaaacaagctgttgctaatttaactgcgggaggctcaacaccttcagcccacgcttatgctgaagcagctgcttacttaatggggacaaccacatattcagagacgaattatgctattcgtaaagatagttatatcaaacgtgtaagaagatctgataatagaactgaatattcatattgtactaattaccgtgattcgcaaattgatacagccaacctatggcaaccttgtcgttcaaatagttattggagtagctggtcaacaaataatccaggtgtggataatgctactgcttatgatacttcatctgactggacttattactatacttattactacaccacttttaattatgctgtagcaaatgcagatagcggtattccaaaatctaaatcaaacgatacagctagcaatccgaatattgttgtagaccgaaatgctactaactccaatgcagtgtatcagtcacctttacctgcagtagcgaatcgccagagttgtgatgggcaaggtatttacttcttatcggatggcgaaccgaacaatacaacaaatacacgttcggcaagtgtcatgtcgactgctttaggtagtacttttggagctgattttaattgttctggaggtttatctaacactacggcagactctggttgggcttgtatgggggagtttgcaaaaagattatttgataaaacaaagaaccctgccggagtttctattcaaacagcatttgtcggttttggtagtgacttttctagtttgagttcttctgatgtaaaaaatgcctgccgtttaagttcgagaacccagtctgaccgaaaaggagatgatgcgtgttcaccgaatcaatctacaaatgcggtagctgcaccaggttatgggaatggtggttttttccctactcagagttcacaaggcgtaacagacagcgttatcgcatttattaataatttagataaagttcctttagaacccttaaccacaggtgctatctcagttccatatgatgcattgaatcccaaaaatttacaggaatatggttatttacgagcttttgagccaaatccagctaacacgtacttaacatggcgtggaaatttaaagaaatatcatgttgttttatctggagcgaatgcaggtacttttgaagctaatactggtgggttggtttacaacgcaactggggcatttagaacgggtacaaaagattattggaatagctctacttataatgatggaggtaaagtcttttttggtggttcatatgcaaaagttcctttacccattgctggacaacctgaaacacgtgatgaagaaggaaatatcacaaaatattattacgcagtacaaactaaaatccgcaacttatttactgatgtttccgccgtcgcatcagatggtagcttaacgaaaatttcaacttctggaactaatttgctaaaaattccagctgctccaccagaaggaactaatccttttgatacggtggctaatacagcaagttatgttttaggtaaatttgatccatcaactggacaaaatattttaaaagcttttcctataagcttgaaattaaaaatattaaattatttaggttattcaacagatattaatgcaacaactctgccttcatctttggttacatcgaatgaaccttatttatcgatggggggaagtattcactctttaccggttcaactaacctacaatggaacactagatgataatgggaatttaacatctgcccgagaacaatccatcctctatggaactatggaaggcggattacatattgtggatgcttcatctggtattgagcaaatggtctttgttcctgcagatattttaaatgattcagttgcttccaaagctttagttgttggtcaaagtgatgcttcagctcccgctcatggtatggacggagcttgggtatctgatccagcctataatattactacagtgggaagtggtagctcggcagtatcaaaagtaactgcaaagcaaatgaatatttatggcggcatgcgtatgggaggaagtagctactacggactagatgtattaagccctacttcaccgaaactgctttttagaataggggcagaccagactgactatagccgtatgggtcaaagctggtctaaacccgtactcgcgaacatccgttataacggttctattagacgcgtcctgattgttggcggtggttatgatcagtgttatgaaaaaccaaatattacgttgactgacgcttgctttaccaatggaaaagcaaaaggaaatgctgtctatattattgacgcaaaaactggtcagcgtttgtggtggacaagtgatacaggttctaatactgataacgccaatatgaagcatagtattgttagccgtattagtactttagaccgtgatgctgatggcttagtcgaccatctatattttggagatttaggcggacaaatttttcgcgtggaccttaataataatcagacaaaaaccaattcgacctatagcagttttggtgtcagagttgtgcgtttagcgaatttagcaacaaatgattcaacttatgatggcacaaatgattatacaggtgggaatgctcctcgtttttatgagcctccaacagtaacgatccacgattatggaattcacacttttattacattaggaattgcatcaggagaccgtagtacacctttagatgtttacccactcacaggtcgtgaaggtatgacgcctgcaagtgcattaagtggacgtcctgtaaataatgtatatggaattattgatagagactttgttaaaaagaacttaatgtctttaactgataatcagcttgaaacaaaagacattacacggacaggcttaagaaaaaatccacaaattctaagaacaggtgaaacaagagtagcacaaattttcttccccactacaggagtaggtaaaggtggttggtatcgctcgctttctagtacgagtgatggtacagaaaaagctaataatagttttcgtattaaaggaggactcaaagcttttgaagaaccaatggcaattacgggtaatttaattattccagtttatgaccctcaaggaacgggaattgttgcggcagatccttgtctacctcgtgttgtgggagaaacagaccgacaaacttattgtttaccatttggtgcttgtcttaatccggatggaaccattaattcaaataaagaaaacccgagcgggtttcaaacaaaaactggtagtaactgtccagctggagtctctgaatgtaatacaaatgtcattggtgcaggtattcgtaatatcacatttgttccaaaaagagatgaacctcctgtgactaatagttgtgggaaattacagctgtctggaaacgagaacggaacaggtgagtggcaatgtacaagtcatttacttcctgtgcgctggtatgagcgctatcgctagaaggaacagcttatgaataagtactctattctacggttcaatcaaggggttaccttgattgagcttatggtcgtgattgttatcgttgctatttttgcttcaattgctatcccttcatatcaaagttatagccgtagagctactgcatctgcggctaaaagtgaaattttgaaattagctgaacaattagaacagcataaatcaagaaattttacttataggggttttaccacaacctctataaccctacctcgcgggggatatacgattcaaattactgatgatacgaccacaggtaatttattaacaaattctgcttctaatggtcaaacatgggtcattaaagcgacaactacagattcaagaaactttaattttattgctaagaattcaggtttgcgttgtcaaagtttaacagctacggctgttgataatgactgtggtggaacagtcacttgcaatgtatgtgaaacaaatagtgagaattggcaatgaagaatggttttactttaatagaaatcatgattgtagtagcgataattgcaattttagcagctatagcgacaccttcatatttgcaatatttacgtaaagggcatcgtacagctgttcaatccgaaatgatgaatattgcccaaacattagaatcagaaaaagtagttcacaatcgttatccgtcgaatgcgaccatacagtcgatttatggttctaatgtgagtcctatacaaggtcaggctctatataagttagcttttgcaactctgaatgattcaacttgggtacttactgcaacacctatttctactagctcacaagcaggtgatggaattatttgtttaaatgaccaagggcaaaaattttgggcaaaaggtgccacagtttgtgcactatctgcttcatcaagttggacagagtaatttaaattcaaaactgcggataactcaaaatttaatctttctttcagggtgaaaatcacgtagaatgtcgccctctatgaaaggggtttgaagtgttgccgatggtcggcgcagggataatccgtaagaattataaggcttttatcatggttgttattcgtttagcacgtggcggcgcaaaaaaacgtccattctatcaaatcgttgtgactgatagccgcaatgcacgtgatggtcgtttcatcgagcgtatcggtttctttaacccaactgcacaaggtcaagcagaaaaacttcgtttagacgcagaccgttttgctcactgggtttctcaaggtgctcaaccttctgaacgtgttgcttctttggctgctcaagctaaaaaagctactgcataattattgtagtaggtagcccatgacaccaacacagaatgttcccgaagatcgtattcagattggacagttacgttcagcttatggattaaatgggtggctctgggtgtattccaatacagaacccatgagcaatatgtttgactacttgccttggtacatcgagaccaaggccggttggcaaatcgttgatgtaaaacgttggaaaccacatggcaaaggcctggttgttgctctaaaaggtgtgagtgatcgcacaggagcagaaagcttggttggcgctaatatctggattgctaaatctcaactgccgaaagcagatgtagatgagtactactggtcagatttgaaaggcttaacagtgttaggtcttgatgacgacgaacaggaagtgaacttggggcaaattcatgagttgtttgaaactggagccaatgatgtgatggttgtacgcgctacaccagacagcattgattcagaagaacgcatgatcccgtggcataaagatgtggtgcaacgcgttgatcttgaagctggtcgcatttacgtcaattggggcgtagattattaatcctttttataggattaacgcagcaggaaaatagaggagtctgcggtgttttttgcagtcattacgctttttcctgaaatgtttgaagcgattacagcctatgggattagcgggcgtgcagcaaaacgtgacatagtacaagtcacttgtattaatccacgtgattttgctgaagggaattaccgaagagtggatgaacgtccatttggtggtggccctggtatggtgatgatggcggagcctttggcaaaagcaattaaccatgccaaacaacttgcttcgcaagcaggatgtgttcatgtacctgtggtgtatatgtctccacaaggcaaaactttaaatgaacaggcagtacagcagtttgtcgattatgatggcttaattgtattgtgtgggcgttatgaaggcgtcgatgagcgtttgatccagcattatgttgatcaggaatggtcaattggagattatgtcttatctggtggtgaactacctgccatggtgttgcttgatagtattattcgccgtttgccgaatgtaatgtcagatgagcaatcagcgatacaggattcttttgtagatggtcttttggattgtccgcaatacactaagccagaccagtttgaaggtttagatgttcctgaaattttaaagtcgggacatcatgccaatattgagaaatggcgttttttgcagcgttatcaacgaactttagagcgtcgacctgagttgattgaacaggttacgttgactaagcagcaaaaaaaatggctgtcagatgaacaagggtaagcatattccctgtgtttttctgagcaaaagatgagaagctttgcttcgaattaaagcataagtctatttttttatagatttatgtgcacttaaggctctttacggttgtcgtaaagggaaagttaaacgggttgatatgcgctttagcctctatccccagcggaaactcaggcctcttctgactccgcatatattggagattcccacaatgagtggtaaacatcctttagttcaagctattgaaaattcacagttaaaaactgaccttcctgaatttgctcctggtgacacagtagttgttcaagttaaagtaaaagaaggtgaccgtgaacgtcttcaggcatttgaaggtgttgtaatcgctaagaaaaaccgtggtttgaactctgcgttcacagtacgtaaaatttctagcggtgttggtgttgagcgtgtattccaaactcactcaccagttgttgctaaaatcgaagtgaaacgtcgtggtgacgttcgtcgtgctaaactttactacctccgtgacttgtctggtaaagctgcacgtattcgtgaaaaattaccagctcgtaaagcgtaagcttatagcgagtaaaaaatgcgccttttggcgcatttttttgttttaaagcttataatccttgaagttttaaacggttagcatgttgacggtaaaccgagacagggtctgctgcaaaaatagaacgtattcccatgacctgattgacttcatctaaatgattccagttatagtcgtcacggatagttttaccaaatttggcactgcatcgagaaaccagcccatcattatccccaaatgggtcaaccactagactacttcctgttaatgcaatatcaaaaggatctaatggatttgtgagtgctttattgccagagaatgaatacatatagattcctttctcttgataagcgccttcaccacaagacgtggtaggaacacccattggaaattgagaattaaactgtgcagagccttgagtcgataaactgtgggcacctgctaaggagtcatgcggataactatttgggtctagacctcctgcccaagtaattgctgcggaaaaccagtttactaatgttgccagtccggatagaggagtaccctcaacattcaggatgacatctgccattggcgatcctttgtgaggtgcaccaatagtagtaagcgaagcgactttttcaggcatgatcccagcgacatagcgaattgtaggtcccccgtggctatgtccgatcaagttgactttaggctttccagtgatggcaataatttcttctacttgttgggcaagttgttctccacgaacttcagttgagttaaacggagaaactcttgttgcccagacatttcctccgttacgtgcaagatcaggaagaatctgataccagtagtccagaccaagcgtatctgttccaactcgattaaaacccgccataccatggttaaaaaccaatggatatttggtttgtgcataagtcgaatagacgaaagagcttttgacttgctcggcatttgtggcatgggttgctgaaacactcagtcctgagagtattgcagcacagaaaaatattaagttccttttcattttttactcactatttttattttgtatgagaagcagcttctactgctggataaggtttggctcactttgaaatagaaaagcctagtagttaaagggtagttcacctccttggtcatggactgtttcaaaagttctaagacgaagctgttcttgcgatgagctaaattgttgttggcgtagttgttggatagcttgttttttagcgttgtcactcatattgctatgcaggacttcatcacgctgatttaagtagccagtcactcgctgttgccacgcattacgctgtatatctaaagtttctaatcgttgagttgcctcggctccaacaagtgctgtacgcatttgccgaagttcctctgctgaaccgttgcgagctttaatttgtttggtcagtgtgtgtaaatcatcaagctttgaaagttcttgtaggttttcttgccagtcttctggtagttgttcaaagcgctctttaagttttttagctttttcaatttcgcttaaagatgaatcttctaaaatcttcatgcgatctaatgtgtagttctgataaatgtcttctgttgaaaataacccttcaatttcagaggcagagaagaaacgttttcttatatcttgaattgagctgaagatcttttgaaaataattttgatcttgttttttagattgaggcggttgaatttgtgcaagctgctcacggtattttaaataacgcgtccacaaatcaataatctgtgagcgggctggctctaaatattgatcttgtataaatttcttaaaatgagttttaacttgttgtaaattgctctcgccatactgcgtaataaaatattcaaagcagtcacgggtttggctattcacaactaaatgctgtgaactatcaatttttaattggcagttaacttgagtatcttgctgacttttactcaaataagtattttcgtttaatgatgaatttaaagtagattgcgaagtagctaccaaacttttagcttcatcctgatttggctgaggtgaagtattttccgagtctgggcttagccaatacacacatgcgatgaggctcaaaataaaaaatccgagcacacaccaccctatctttttctgcatcctttgcataaagatatcttccttaagttttcatttgttgtttttttactcgatcattaatgtgccataaaataagtgaaaaggcacctaaatattatgaaaatatcttgctgaatttgctaacatgtcggcacttttctctagctttgtgttccagtaaaaatgacgacaaaaaatcaaaaaatttctcgtcgccatatcagtggtgtatttcttttaaataaaccattagggctaagttctaacgctgctttgcaaaaagtgcgttggctttaccgtgcccaaaaggcgggtcatactggtgcattagatccattagcaaccggtttacttcctatttgtttaggagaggccactaaattctcacattacttgctggactcgacaaagcgttatcaaactactgttcgattaggccaaactacaacaacaggcgatgttgaaggcgatattttacaagaacgtcctatcccggttcttagcaaagagcttattgagcaaactttagaaaagtttaggggcgatattcaacaagttccaccgatgtactcggcattaaaaaaagaaggtaagccgttatatgagctggccagaaagggtatagagattgagcgtgagacacgcccggttacgatttatgctttagaactcattgaatttactgaaaatagtatcactttagatgtaacttgttctaaaggaacatatattcgtgtgctaggtgaagatattggtgaggtacttggttgtggtggtcatttaaccatgcttcaccgtattcaaactggacattttgaactcatcccaagttataccattgaatatttggaaagcttaatggaagagcaaagagaagctttgctactgcccgtatatgctccaattgaccatttcttaaaaattcaggttcccgaaggacgggaaaaatatttttgtaacggtctagaaagcaatattgatcattctgcagaagcagaagtgttggttttttcgggtgaacgctgtctaggtttagctgaaattaccgataaaaaacggttggtacctaaacgtatcttaaatttgtagtagatgtagagtataaaacatgggcatggaatgggatgttatccttagtttgatcttttttgcgtttactgcgggagcaattgatgctgctgttggtggcggcggactcatccagattcccgggatcatgagcacttttcctaacatgtcgactgctacagtgattggtaccaataaagtctcatccatttttggtacggcatcggcagcttatacatttgctaaaaaagtaaagttgcaatggaagcttttagccgttattgccatttgtgctttgattagttctttcgcaggtgcggcttgtttgtcgcttatccctcaatcggtattgcgtcctttcgtattcgtgatgttgattgtgattgcgatttataccctagttaaaaagaacttcggacaggttcataccgagcaaaaaattaccacgaaaatgttaattttagctggtatcggtagtctggcgattggcttttatgacggtattttcgggccgggtactggtagtttctttatttttttcttcattcgttttttacaagtcgattttttacatgcttcggcgttatcaaaaatcggtaattttatgactaacttagctgcgctgagtttcctcatcccaactgggcacgctattttacatattggtttgatgatggcagcggctaacgtgctaggttctattgttggggtgcgtaccgcgcttaaatacggtagtggttttgtacgtattatctttttaattttggtgagtatcctgatttgccgtttgggatatcaaatgtttgttacaggttaaataagataaaagtatgaactgttcctgaggagtggttcatacttttgtgtatcatttaaagctataaatataaaaatcattacagaaacttactagaaagaaaactgtgtaaaaaatagtctcattttaagctacttaaataatataaattttgccgtacgataaaccttgaaataaaaaagattttttaactaaaaatgaggaagagaatgaatattttcgaagcattaagagaaagccacgaaaatcaacgcaacctttctgaacaattaatccagacacatggtttaaccgaagaacgaaaagaattatttgatgcattaaaaaacgaactttatgctcactcagttgccgaagaccgttatttatatattcctttaatgtttgatgatgtcggtttggatattacaagacatgctttatctgaacaccatgaaatggatgagttggtcgagcaacttgaaaaaacggatatgagtagcccaagttggttggcaaccgctaaacagttgagcgaaaaagtccatcaccacttaaaagaagaagagcataagttttttcagcaagccggtaaaattcttaaagacagtgaaaaagaaacgctaggcaataaatatttaaaggaatataaaaagtataaaaaacagcaataagctacacctatgatgctgttttacttcttaaagtaaccccaattgaagctagcattacgcaagctaaagccacccattgcagcatgctgatttcttcgtgaagtaataagaaacctgttaatgctgccaatgctggcgctaaacttgttagggtgccataagttaatttattaagttgtttgagtgccattaggtctagtgcatagggaatagcagtcgctaaaactgcaataactaaggctttaccccagtactgtgtatcaagtaatgctgggccattataccaaataccaattggtaataaggcgatggcagatacggtaatccctatggttaaggcatgcattcctatattttgagttacaactttttgaccaaaataaatatagaatgcccaacaaagccctgcgcctaaagcacaggctgcacctacgtaagaaaagtggtgttgagttggatcttgccaaggtaccatgagtgcaatacccagcatggcaaaagctacccagatataatcgctcttttgtttgatagaaactagggctaggcctaatggaccaataaattctagacctactgcaatcccttggggcaatttcccaagagatgtgtaaaataagatattcattaaccctaaagatgcgcagtacattaataaatcacgccattttaaataaggtaagcgagaccagattttccaagaacggaacataacggcaacaatcactgctgcaaaacatagtcttaaaatagtaacggtaagcggatctaaagctgcgataagttgcttggcaaatgaagcgctgatttgatacgaaaccatcgacaaaatcatatagagcacagcaataattggaagattttgcatggaaataccttaacgctttatttgatatttaaaaaaataagggtgattaattatagccaatactgggtttcaactcgtaggttttgcagaattaacttactgttttttcacgttgttgtcgggctctttgggtggttatggtacaacccacagaagcagtaataatggtggcgagtgccaaccattgattccataacaggtattcacctaagaagataaaaccggaaagtgcagcaacagctggttctaggctcatcaatgttccaaaacttaaaggtgttaaattgcgtagagctaacatttctaaagagaatggaagtgcactggctaaaacggcgagaccaataaaataaaaaaagtatggtagttctataacttgcccaatcgagcctgagaaaaaagtaatgggtaaaagtatacaagcacctacagtcatgcccaaacaaacggtatggttacctgagataccagaaggcttttgccctgcaataatatatagggcccaacaagcacccgcactcatcgcaaataggactccaatccagtccaaactatgtgcttggttaaaaggaaataataaaatgagaccaataattgcgaaagtgacccagacaaaatcatatttttgtttagcatggtaaagggccacactgagtggaccaataaattcaaatgcaaccgcaataccaatgggtaaacgttcaagcgataaatagaaaagagcattcatgccagcaagagcaaagccatagctcaaaatagctttccatcggacctgactaaaattaattttccagatctgaaaaatgaaagccaaaataaatgccccgatacataaacgcattgcagaaacagtcagtacaggaaagttctgaaacaggactttagctaaggatgcgctactttggacacttaacatggcaagaataagaaagcccaaagcatgaagctgggatttctggcttggactggacattttattatttgatcaattggtatacttttcacatgataatgtaaatacctataaaaaagccacagacaatgctgtggcttttaaatttacagtctgtattagaacaatacgcgtacgcgaattgtgccttcaacttcatgcaacatatctaaagcttcttgagaagcagaagcatctacgtccattacaaggtaaccgatgtcgcctttagtcataagtgactgaccagaaatgttgatgccttgttcagcaaacaagttgttgattttagacaatacacccggtacgtttttgtggatgtgtagtaaacggtgttgacccgctgtcaatggcaacgcgatttctgggaagtttaccgcagaaagtgtcatacccttatcagagtaagcaacaaatttctctgctacttctaaaccgatatttgcttgagcttccattgttgaaccaccaacgtgaggagtcaagatcacgttgtctaaaccacgaagtggagactggaattcttcaccatttgcttttggttctttcgggaatacgtcaactgccgcacctgcaaggtgaccagatttgattgcatcagctaaatcttcgattactacacatgtaccacgtgcagcatttaagaagattgcgccttctttcatttttgcaaattgttctttagtgaagaagttacgtgtagacggaacatccggtacatgcaaagtcacaacatcagcagttgctaaaagttcatctaaagaaccaacttggcgagcattacccattggtaatttagtgactgcatcataataaatgacatgcatacccatactttcagcaagaactgaaagttgagaaccgatggaaccgtaacccacaatacctaaagttttgccacgagtttcaaaagaacccacagcagatttgtcccaaccaccacgatgacaagccgctgacttttcaggaacacggcgaagaagaagaatagtttcagcaagtacgagctctgcaaccgaacgcgtatttgaatatggtgcgttaaatacaggaataccacgtgccatcgctgctttaagatctacttggtttgttccgatacagaaacaacctactgcgatcaatttatttgcagcttcgaaaacttcttcagtcaattgggtacgcgaacgaataccaataaagtgagcatctttaattgcttctttaagcgcttcgccttcaagagcagttttgcgatagtcaatgttggtataacccgcagcgtttaaagtatcgactgcgttttggtgaacgccttctaacaaaaggaaacggattttatctttaggtagtgaaagatgttggctcattacggctccgctacaaaggccaaatttggtggcggtataataacatactgggcagcgctatagatatttcgtttataccatcgccttatggcaattttatctatgtctaatcacttccatttatggcttgtcgagcgttacaaaatatgcttggcctacgttgaggcccaaattttcctttaaggccttataaaaagtgttttattggtgttaaacatgttttgtagtgacagtatctctattctgaactttatcgcttgtgctgttacatgtagaatataggagttccttgaacattatggctttgctcaggtgaaaacctagagaaatatgaggtcatagtcccaccacagtttacttcttgctaggtctgcaaacgatgaatgctccagtcgctttaacacctgagttactcacccaattaacagcaatcgtcggtgaaaaccgtattaaaaccgatgctgatagtctcgaaaactggggtaaagatcataccaagcattttaatccgaacccatcggtcatcgtttttccgtcaacgactgaacaagttcaggaagttgtgaagcttgcaaaccagtttaatatcgcaattacaccgtcaggtgggcgtacaggactttctgctggtgctgtagcaaccaatggtgaaattgtcattagcatggacaaaatgaaccagattcttgagttcttcccggcagaccgtatggttcgtgtacaagctggtgttgtgactgagcaattgcaaaattatgcagaagagcagggtatgtattatccggttgactttgcgtcagcaggttctagtcagattggcggtaatatcggtaccaacgctggtggtattaaagttattaaatatggcatgacgcgtaactgggtactcggtttaactgtagtgacaggtaaaggcgacattttacgtttaaacaaaggcatgattaaaaatgcaactggatatgcattacagcatttgtttattggtggtgaaggtacattaggtttagtgactgaagcagaaattaaacttgagcgtcaaccacaaaacctacaagttttagttttaggtgtgcctgattttgatgcagtaatgcctgtgttacatgctttccaaaaagatatcgacttaactgcatttgagttctttggtgagcttgcaatgcaaaaagtactcgaccgtggtcatgttcaacgtccatttgaaactcaatgtccattctatgtattgcttgagtttgaagcgccatacgaaccgattatcgacaaagcaatggagattttcgagcactgtatggaacaaggttgggtacttgatggtgtaatgagccagagccttgaccaagtagagagcttgtggcgtttacgcgaagatatttctgaatcaatcgcgccgtttattccatacaaaaacgatatttcagtattaattactcacgtacctgcatttattcgtgaaattgatgcgattgttcaagaaaactatcctgactttgaaatttgctggttcggccatatcggcgacggtaacttacacttaaatattttaaaacctgaaaacttgaccaaagatgagttctttgcgaagtgtcaagttgtgaataaatatgtgtttgataccgttaaaaaatatgatggttcaatctctgccgagcatggcgtaggtatgacgaaaaagccatatttggaatattcgcgctcagctgaagaaatcgaatatatgaaagctttgaaaaaagtatttgacccgaaaggtattatgaatccgggtaaattattcgatctttaattagatctattttgtagaactacatagtttctacagagtaaccgacaaaggcatagcatcataaagctatgccttttgttttttggtgatgaaaatgcaacgtttatttttaatttctgcactctgtgctggacttatgacgggttgtgcaaccacaagtaaattaattccttttgtgggctcagaaaccccaatgcaacaagtacttaaaacgcaacccgagattgtaaaagagcataacaatacttcagttcagcaggtatttaaccgagtagaatccccaacagtttctcgcattactgttatacaaaccggtttaatggatgactctgtctcagcaattcggacggaatatttatttaaattggttgatgaaaagtggcaattgcaaaataagcaaaagagctaccaatgtgcaagaggaaaaggttctaaaggtttccaaacgcagctttgttcttaagcataaaaaagacgataaatatatcgtctttttttatttcttaaattatacgccgctttctagaattttaattttgacgtcaactacatcatctttgactgcttcatgatgcgcttgcatatgaggtgtagctaagtgtgcttcaagatgagccacactttcccatttttctaacatcacaataatgtcagggtctttgttttggaagctcgcatttgaaatgtggtcaaccaaaggttcataaccatgacaaccatcttctgctaaaacagttggaatgattttttgaaatgcattcaatacgttttggcggtgctgtccacccgattgagtacgaatttccgcgataatagtaagcatggttttctccgggttaggctgctgcaaatagtgtgttcaaatgtgctttgtatgcttccacataactatctacatcaggcattttaattacatcatttacaataaatgttggtagggtgctcatacctaagaactgatttgctttatgaaatggtaaataaacaccatctacacccacgccatggaaaaactgatccgcatcgtcaaatgcttccattggcgcattccaagtaagcgacaacatatattttttgtcatgaattaaaccacctgaaccatatttttttgaggcatcagagcggctacgaccatcacttgcataaagagaaccatgacctgtcgtaaatacatcgtcaatatatttttttacggtccacggtgcacccatccaccagcccggcatttgataaatcacgacatctgcccataaatatttttctacttcagcttcagcattgtagtcactatctgcacgagtgacttttacttcatgacctagttcagtgagatgattcgtcgctaatgtcgtgagtgtgtcatttaattcaccatttgagtgggcaaattgtttggcaccattaatgactaaaatattgctcatgggagttactctaattcaattcttaaacttgagcgatactttagagaacttactcttaaagaaaaatgtagtaattggaaaaatattattgattaaaaatcattaatcttggtttgataccttatattggtttctttattttaatggcaaatactttacaaagttgaacggaaaaaattatttgtagcctttagcatcaaggtgaagttgtggtggagttgagtatgaaaaagattggtttactcatgatgtgtaatttgttgattctgagtgcttgtacacccaatacaaatccacctacacctcaagcgaacagtccgatacaagctgttttgctcgatcaacctaatcttttaaataatgccagtaatttaagtatttcacagcaaatgaatgccttagaggatccttccaatgctcaagttactattttgcagacagagccgagtgaagatgctgtttcgaaaacacgtactgagtatttattaaaaaaagatcagactgtttggaaaatcgtgaataaaaaacaaagttatcaatgtacaaaaggcgaggaaacagcagactttcaagttaatccttgtccttaaagctgaattactattgaatatgtggataactttagggttattcacaatataaaaatgagttcgtcatcattaaaatatagaatttaaaattgttggaattgtccgattgatgatcaatttgaaaagtgatattgtgtcatccggcaattatgccagatggtaaaaattaccgaatctcacgtcatacattttttctcgttttagacaccttgtgaatacggtgtttcacattctaaacatgcactctcacggcatataacaacttaactaaagattgactgaccatactgtcatcgtcatgactacattatttatttcaatatgtagttgctgagacatagtggccgctattttgaagtgtacaaactcatgaaaaatattcaaacgacagcgttgaaccgtacaacgttgatgtttcctttagctttagtgctatttgaatttgcggtttatattggtaatgacctgattcagccagccatgttggcaattactgaagatttcggtgtaagtgcaacttgggcgccgtcttcaatgtcattttatttattaggtggtgcatctgttgcatggttactaggacctttatcagatcgattaggccgtaaaaaagtacttttgtctggtgttttattttttgccttgtgctgttttttaattttattaacgcgacaaattgaacactttctgacattacgttttttacaaggtattgggttaagcgtaatttcagcagtgggatatgccgcaattcaggaaaattttgccgagcgtgatgcgattaaagtcatggccctcatggcaaatatttcattgcttgcgcctttgctagggcctgtacttggagctttcttaattgattatgtttcatggcactggggtttcgtggcaattgctttacttgcactgctgagttgggttggcttaaagaaacaaatgcctagtcataaggtgagtgtaaccaaacagccttttagttatctttttgatgactttaaaaaggtatttagcaatcggcagttccttgggttaacgttggccttaccgcttgtaggtatgccgcttatgctctggatcgcgttatcaccaattattttggtcgatgaactgaagctaacgagtgtgcaatatggtttagcacagttcccggtatttttaggtttaattgttggtaacattgttttaattaaaattattgaccgtttagctttaggtaaaactgtcttaattggcttaccgattatgctcactggtacgctaattttaatattaggtgttgtctggcaagcctatttaattccttgcttgttaataggtatgacactcatttgttttggtgaaggaattagcttctcagtattgtaccgttttgcgctcatgtcatctgaagtgtcaaaaggaactgtagctgctgctgtttcaatgctattgatgacgagcttttttgcaatgattgagcttgtacgttacctctacacccaatttcatttatgggcttttgtcttatctgcttttgcatttattgtcttgtggtttactcaaccacgtttagctttaaaacgagaaatgcaggaaagagttgcacaagacttacattaaaaaaataccggaatttatattccggtattttttattctatttaatttcatgctctaaaagtttgccttttaagcttaagagttcaggcaaggtttctaataataaactcatctgttttaagacaagtgtgtagttctctgaaaaatgttcgtgagttattaaactttgaatttgctttaaagtctgttcaagaaaactaaagttaaccgacgcttgttcaaataaactttgtttaagaatttgctgacaatccagtaaaagttgtaatacctgttgatcatcaattttttgtctttggctgcctaatgctgcgacataactcaactggctgtggctataaaccaaataacgaaaggcgtaatgaatcagctctggatttgggttgggctcggcacttaagcttgaaatcatattcgacagttcaatttgcgcgttatgtgcagcacggcgaattctacgatattcaatgtcttgatttttcccatgctgatattgctcgacaatcacattgaagtaatcaaaggtggcttggctacttttcttaatattgtttggaatattacggaagttccagtccggccatataaaattaacagcaagccaagcaataaagcagcctaataaggtgtcgattagacgaggtaaaataatgctgtaacctgcaccttttaaattgaaaatgagcaataccattaaggttgccatcagtgttgccagcgcatattttttctggcgtaagtagaaaaagctaactccacaaataatggtaagaatgagttgaccttcaatactaggaacaaaatataaaatgggaatacccaataaaacgccgagtaaagtcccaatcgttctaagctttaaacgacttttggttgcaaagtaagtaatttggcaaacaaataaactggtgagcaaaatccagtaaccatgttgggcaaaaggtaagagggaaatggcataacctgcggcaaatacaaccgcaattcgtactgcatgtctaaatagggccgattgtggcgtcagttgctgccgaatttttaaaacaaggtctgaaaatccttgaatatcatcatctagtaaattgagatgttcttgcttgttctgacttagcgtttcattaaacggttgagcatattgaagctgctcaaattgttcatgcattccttttaaattattaaaaattagctttaaatttttaacttcaaaattttgtggatgctgttgtatccagtctttcaaagagctttccaaatggtttaggccaatttggctttcttgagaagactgatattgttgattatgcaaaatgcattgggctaaatcatggcaagcttgtgcctgtaagcgtaggtttttctgaaaacgaaaaatgagatcgctacggctaaaattttgttggatatgctcgtagtgtaaataattagaagttgcttgctcgtgtatatctcgcgcaaaaaagtataggtttaaccagtaaatacttttattactgactcgtgatgccttaaggcgagtcagcagagagctgcgtatttggttaaggctttgcgcaacttgtgtattttgtagtgataacttaaataaaagctgttcaacattttctttattatctgggtcgaacaaccgtgctttagcttgaagtaaggctgaaatttcttcaaaaatttgtgaaagtttatcttgtaaaggaagtgttggtttaagaataaaaaataaaatagaagttaggccgtaccacaacgcaccatagacaaaataagtaggctgttggtaccagtatgcatattctcctaaaccaaacatactataaattgagagtaaaatcgtaccaaaagaaatggtagcgtagcgttgccctaaagctcccaataaaatgaaacaagcactggaaattgaaagatataaaataaataaaaatttataaggtgctaaaaaaccaagaatagtgctgacagtaaaaaagagtaggcagacatagagcaggttgcgtaaacgaagacttaagcgatcatcaaaatcagtaagtgcagcagcaatcgcacctaaagtcacaggaacgatcagctcattatgacctaaccaaagtaaacctaaagttgtgcctgtgagtacaattaaaatttgcaggcaataaattaaaattgaattcgttttaaaacgattgaatagttgagtcaggttattcacggcttttttctaaatgagagggtacgtgacaattggtatttaaatttttattacttgaaaaatattatgcgttttgtttaaaaaagtcagtttattttttaagattttataataattaattagtctaagttgcttaataaaatagcaaaattgtggatatctttttagatacccacaatttaaaaaaaagcacttatttgattacaccacatgcgattcgcgctccgccaccacctagaggcagaggagaatctgaatagttatcaccaccagcatggatcatgatagcgcgaccttgaatgtcagcaagttttaaacgtggtgcaataacagcagttgtagctacaccagtattgtcaacgactaatgctggtaaatcgcctaaatgcccggtagttggcgtaccatgatgaggggcttggttagggttatagtggctaccagcagctaaagcagcgcctggttttccatctttaacagcaggggcacaagatggattttcatgaatgtggaaaccgcgagtaccacttggtaaatctgctaaagcaggagtaatgattaagcccttatcactatcttgaaagctaatcgtaccaagttttttacctataccattggctgtcacttcattaacatccaccacttttttagtatgcattgtggtaagtgcatgggctgtatcagatacagtcttacttaccgtgctacaaccgaccgttaataaagctgtcagtgcacatactgcaccaattttattaaatactggcattatagatatccttataactataaatctgatttttttattcaagcaaaggtgcgtgaaccctacaagttaatttaaatagtcactttgtatcttgaaatatttttaaatcattagcttagtttttagatggtggtaaatcatcatctgaatcataaatcatggttgtttttggcatgggttcagggtcaatcgtctcatgaagccattcacgccaaatcgctaataaaacagctaaaataacagggccaataaatagaccaactaaaccaaaacttgcaataccacccaatacaccgaacataatcaataaaaacggaatttgagtcgcaccagagattacaagtggacggatcacgttgtctgaactacttacaatcagcacaccccataagatgacgccaatagcttccatggtttgaccttgagaaaacaaccatagaccaacacctaagtaggaaacaggagtaccaaacggaattagggctaataagaacgttgcaatggtgagaaccattgggttaggtacaccagcgacgaaataacttaatccagccagtactgcttgagcaattgcagttaaacccacgccatacacaacggcacgtgttgtttctgaaattgtgtcgagataatgatgaatacgtggcccaatcaccatttccaaggctttactcacttgggttaagatcgtgtggccatcacgataaaagaagaaaagacttaaaatcgcaaaacaaagtttgacgatatttttactaatttcatttaataacacacgcccataacttaaatggctttgtacccaagctgcaatattctgaatagtactattagggtctgtgttaatttcgttgagtgtacgagatatttctttaccaataaacggaagattacgaataaaatcgggaacgcttaaatgacctgaaaagacttgacgctgtaaatcaaaataaaggttgcgaccttcatgttgtagaataaaaatagcacatgtaaatggcacgccaacaattaaaatgactaagctaatcataactgtagcgtttaaattatttcggttttcaccaaaaaaatgctgaattcttaaataaatcggccaagtcatgtaggcaataatggcagcccaaagtacaggtacaataaagtacttcaggatgttaaatcctaaaaagatcaggataaaaaacagcccaaacaataaaacgcgctgtaaagtaggagcgtatggatgcacgaacaaaattctctaatttttaaaatagaataaggtcatattaactgaaaaatgacctgagacaaattttaggcaggtgtgctcatttctgcatcttgcccacctaaaataaagagatggttttagaaccactcagatttatcttcaatcagtttatttaaaagaggctgccactggctttgaattgcaataaagttcttttgtggtttatcaaatacacttaaaccttgcattgctaaactgccataagcactacgctctgcaatccatgcaataggttcatgttcgattttttcaaaaaattgctgaatatcttttgagctggcgctgttcggtttaactcggtttgcaagtagtaaaatttgtactttacctttacgaatacgtttaatatcttgcaaatgcttgagaaaacgtcgtgtactgtcgatatcgaaaaatgaaggctgaagtggagtaataatcgcatgggcttcgctgactaattgttcagcatgatcacctgaaagggcacccggtgcatcaataattaaatagtctaaatttttaggtgcatcaccaattgatttttcttgacgccagtcgaggctttgaattacagctacgttatctggacgttgttttaaccattgtaaggaagatttctggttgtcagaatctgccaatgctactttatatcctttttgtgccaaagctgttgccaacgtaatggctgtcatggtttttccgcatccgcccttttgatttgcaataagtatcgttttcataaattcagttatattcagcagcacacttgttctacttataccttagcatctttttatgtgaagtagatgactgcctttgacaaaagtttaagctactccctaattttagatatgattgctcatctatcgcgatgatgtgtatttgttaaggaaaatttatgtccgtatggctggccatgcttattggtgctggtattggtattattatcacgacgctcattttatcaaatacccgtaatggccgaatcaaggctgaatacgagcaatatattgccgagttggagcttgagcatcaacaagcccttgcccaagcacaaaagagaagtgtgaatacgagccgcgccgtattaaaaggaaaaatggcagaacaatttgcgccggtcttgccggagtttcagtatttgccaagtgatgccaagtttatgggcgacccggttgattatattattttcgatggctataccgattttcgagatggagacggaactgccgatgatattcaaattattttgctggatgtcaaaagtggaggggcacgtttaacaaaggggcagcaagcaattgctcaggcaattaaggaagggaaagttcgctttgaaactttaagaatagattttgaagattaataatctatttaattaggcacaaaaatagacgaaattgatctgtattgttactaaattccgatatttttttcataccttagagctaccataaaacgaagatctaatgaatttgatctagcaatatttgaggtataaagcgatgaaaaaacaacgtttgatgatagctttgctggcgactttaggcatgggttcagcacttgcatcaacctcgagtgaatacaatattgccaatggcttgcttccagttgaaaaagatcaatcaatttctgtattacaaccatttcagggaaattttaggattttaggttcaaaaatttatcacaatgatgagcaagccaaattttcaccgattgattatgcggtaagttggggtttatttgctcaacctgaaatcgcgcgacatatttcagtgaaacaatatgaccgctatttaaactggaaaatagcaaaacttcctgtaccagctgagcaagcaatgcagatggtatcgaatatgcacattattcctgcaaaccctgaaatcgcccaacaaattaagcaagttaagcgtggtgatttggtttatttaaaaggtgatctggttgaaatcaaagataaagatttggtttggaagtcatctttgaccccaactgataccggcgatggtgcatgtgaactcttccgtgttcaatccattcactgggttgaaaaacaaaatatttaaattaaaaaagccttctttataagaaggctttttattgcatgcagttaaattaatgctgctgtgaggctttccagtactttaactgattttgtgcttgtaaatagtcagcaagctgtttgacctgctcatctttacttgcctgcttatcactaaagttcttttcttggttttcccaatattgatagagtaagccctgaatataacgaccttgttcagtttttaaatcgagatcttttaacatggttaatgatgaacgcacgttatcaagtgtacgtttttgttcaaattctgcggtgagtgtgccagcctcatgcaattttgctaactcattttccatctcgtcactcatttcagtaaagcggtgatcgtaatcttctagtagtgcaatatcatgagcgtcatccgcagtagctgggaatttcttcactggtctttcattgagtttttctaagacctgatcggtagatgaacttgtatgagattgttcagtctttgctggctcatctgcttttttacaagccgtcaataataggctagagctgagcaaagacattaagatgatatgaggcgttttttttaacatagctttcaaccgaacctattctctatgatttgacgacgtacttttttgaaaatgatatgcatatgtaatatatggaaaaacaatctgatcttgtgggcctaacccagtaaaatcataaacaattttttcaaacttagctttgagctgtagttgatctttttcagtcattgctgcaataaaacttgttgaaagtaaccgtttactcaccacttgttcgacagtaccatgctgcgattgcgaaaaagtatttaaattgtcaaaagtaaataaatcttgctcttcaaaaacctttttccacctttcactatggtaacgaggtgtatcaccttcaagtggtagtagaaaatccgctaaggcttttacccagtctgtactttcatcgcgctggttccaaacaagtcctaaatgtccttgaggttttaatactcgatggatttcggtcaatgtttctatgttgtcaaaccaatgaaaagattgggcacaaatgacagcatcaatttgttggtcatttaccggaatattgtggctaaaggcttgtatagttttaatatcaggataggcttgctgaagctgttgtaacatctcgccaattggctctactgcagtaatattggcatgtgtctgttttaagtaaggtaagaatttgccagtacccgatccaagatcgataacagtagaattttcatggatttggagccgatcttgtagccaacttactatttctacgggataatttggtctaacttgctgataaagctcagcagcagagctgaagcctttttgagcggcaggatgtaaggattgtgtcatattttgcgctttttaatctgactggcatctataaaataagatactccgcaatcataaattggcaaaacacctattttgtttcatttttgacgatgtatgtgggagtaaattttctttcggtgtgagcatggataagcaaattatttttgaagacgaacacattagagccatttttttacaaggcgattctaatatattagttctctcttttggcgatttgattacccgggcgagtggcttatctatcaatgctgaaaagtctctaataaagtaccaatacagtgttattggggtgatgccaaaacaaaaatcatggttcccaaaggccagtatggttgagctggcaaaagtcattttgcctattattcagcgttttaaaaatattgtaggttatggcggctcaatgggcggctatgcagcaattaaatattcgaatttattaaatatgaatcgaatcattgcatttgtgcctcagtattcaattgaccctgaacaagttgaagaccgacgctatgctgagtttttcgatgctgtcgcgaataaagacatgcaaattcagccgcaagatgtagatgcaagtcgtgaatacattattgtttatgacccttacttttcaattgatcgcgaacattacttaaaaataaaagagatcttaccaagtttacatacaattcatttgccttttacaggacatgaagctttatctgtattggcaagctcaagccttttacatgattttattgagcatgaatttgatgaaacgtatttctatcaacaagttcgtaaaatcaaaaaacaaagtaagttctattatcgtaatgttcttgcaaatgtgctgacataccatgacagcatgttattgaaaatattgcgtcaaaatgactttcagttagatgaacgttatttagacaatgcgcttaagcaagcggtctcacgtagtcttattaaaacaaagcaagctacagagcaagattttcagaagcttggaattaaaattcagtatagccagcaagctgaaaaccctaaaaaaggttttaaaaatcaatttgaggcaatactagtatttaatttgattaatctaaagcttgaaacctatgctgtagatgtagtgttggcaaacccttcatatttgattccgattgtggcagagcacactggggttgttcagattgaattaaataatgaactttatttgttagggatgaatgaccgaaaaattattaaattgtttaaacagggtgacgcactcacttcggatatgagtccgtttgtcattaaacaatattctgatttctttgcgttaagctacaagcaattaaatttaaattgtgatgaacaaggtgtttgtgattacgttgaaggttctgttcagccatctcaacagtttgtattgaccagctactaagtcatttcctcgattaaataaagctcaaatcttgagatttgagctttattttttgcttaaaaaatatttttttatcaatttatttgtatataaaattaaaagtcattatttaaataaatagtgtctctaatttttaaataaagataaagctaaaagtaggcatggggaattaagtgaaaaattattatattttaaaaagtatgattttttaatttatataaattaaagaaatgatgtaagattaattaaaatacaataattatcctaataattattaattgtttgtttttaaaatatattttatttggttggcaaaagattgcttaaaataactccactattcaaagataattgcatatttatttttttatcctaaaatgattttttactaaattgtcgttacagttttttatatgcaatcattaaattatcggaataatgatgcatcgcaacatggaagttctgcacctttgaaacgagcaatgagtactcgacatttggtgatgatctcccttggcggtgccataggtacaggtctttttcttgggtctggcgacgtaatctctcaagcaggtccaattggcgcaattatctcttatttcttgggcggtctaattgcctataccgttatgctgtgtctcggtgagctagcggttcatgtccctgagtctggctcttttggtgaatacgcacggcgttatatcggtccaggtacggggtatatgattacttggctatattggctgacttggactgcaactttggggactgagtttaccgctgcggccctgttggttcaggagtggtttccatctacctcggtatgggcttggactcttttctttggcgccttggttttctttcttaatgtaagttcaacccgcttatttgcagagtctgaattttggttggcgcttgtaaaagtaatcaccattatctgttttattggtttggggctgcttgcaattttcggctttattccttatcaggggcatgaaacagcaccattgttcagtaatttgactgctcatggttggttcccaaatggtcttttcccaatttttgccactatgcttatcgttaactttgctttttctggcacagaattaattggggtggcggctggcgaagctgagaatccagcaaaaacagttcctaaggcaattaatgcggctatttggcgcttattgattttctttgttggtacgattgtagtgattagttcactattgccataccacctagcaggtcttagtgcaaatgatgtgagcagtagcccatttgtgactgtatttaattacattggtattccgtatgcagaggatattatccgtttcgtaattattacagctttactatcagctgctaactcgggtttatttgctgcatcacgtatgatgtggtcgctttcagcaaaaaatcaattacctaaaatttttgcgaaactcacgccgtctggaacacctattattgccattattgtgacaatgtttggtgctattccaggattgctttcagaacaatttgcaccagaaacaatttttaaaaatttgttgggtgttgctgcttttacaatggttgtcgtttggattgcaatttgtatttcgcaatttaacttccgtagacagtggtataagtcaggaaaaacagtaaaagatctacgtttcgctgcaccactttttcctcttactccaattgtaggcgggctattctgtatagttacttgtatcagtatggtatttgatccttctatgcaagtgggctttatctgctgcattatttttatcttgctatgctatgtcagctatttcatcttttatcgtaaaaaagatatagctcaaaactaagtcttttgcttacttggttgtgttgattgaaggctccttatggggccttttttcatgggcgcaacttgagctttatatattttttttgaaaatgttttttttgttttgataataaaaccaaatattgacacataaattaaccacttgtcggaatattattaatagctaattattataagtttttaaataagtatatgtttatcatggttatttaataaagagattgtttaaatatttatatatctttgttttgaattagagaaactgaataaatattatgaaaatttatagaaattttaagaattttttgaaattttttgttaattaagtctttgttattaaatggtaattttttaatcatttttaattttaatatttttttaatttccataaaataaaattattatagtgtagtgtttttttaggtctggttacttttttattataaaaaatagagaaaattgattattttttctctgcttgtttattttaaaatgttctaaattaacttgctctgtgctatatttacttaaagattttatgtctatatgaaggcttgattaactcgcttgagtagtgatgtgaaacttgcagtattactgaacaatttttatttaaaaagactaatggagggatctatcgattagtcaaaaataattttagggacttatggtttttttgtttcatgaaccctagttctttttaactcccaaacggttatgtcacctcttttgtacttatttccagtcgacttatttgagttggttgcggtggaacttttgcttttataaagactttttataaatggcagatgaggcaaaagaatattgtaaaagatatcgatatataaaagtaaatcgtacttttgatatcacaagatggaatttaaaaggtctaaagctttagaagagctgaagattttataaataaatcaaaacattgttattgcaaggttttggttgctgaataataaagactgcagatttatcacatctgagtctgtgtaggtagataggaaaaaagatgtcagatctttcatacgtaaacgaacatagcgatgcatggcaaacttacttggctcaaattgaccgtgtagcgccatacttagaacatttagctgattatatcgatactttaaaacgtcctaagcgtgcgcttattgtggacgtgccaattgtaatggacgacggttcaatccagcactttgaaggctaccgtgtacaacacaacttgtctcgtggtcctggtaaaggtggtgttcgttaccatccaaatgttgacttaaatgaagtgatggcattgtctgcatggatgacaattaaaactgcagttttgaacttgccatttggtggtgcaaaaggtggtatccgtgttgacccacgtaaattatcaaatcgtgaattagagcgtttaactcgccgttatacgactgaaattggtcacattatcggacctcaaaaagacattcctgctccagacgttggtacaaatgccaatattatgggttggatgatggatacttattctactagccaaggtcacacagtgacgggtgttgtaactggtaaaccagttcacttaggcggctctttaggtcgtgtgaaagcaactggtcgcggtgtattcgttactggtcgtgaagttgctgcaaaaatcaacttaccaattgaaggcgcaaaagttgctgttcaaggttttggtaatgtaggtagtgaagctgctttcttatttgttgaatcaaaagcaaaaatcactcacgttcaagaccacactggcacaattttcaatgctgatggtattgatcttgttgcgctacgtgatcacgtaaatgcaaaccaaggtgttggtggttttgctggtgcacaagcaattgcagatgaagatttctggactgcagaagtagacatcattattcctgctgcattagaaggccaaattacagttgagcgtgctgaaaaacttaaagctaagttgattttagaaggcgcgaacggcccgacttatcctaaagctgaagatgtattggttgagcgtggcattgttgtagttcctgacgtggtatgtaacgccggcggtgtaactgtaagttacttcgaatgggttcaagacatggcgagctacttctggagcgaagaagaaatcaacgagcgtttagacaagttgatggttcaagcaatggatgacgtttggaatacagcgaacaagaatgcttgtactttacgtacagcagcttacatcttggcatgtgagcgtatcttaaaagctcgtaaagaacgcggtattttcccaggctaatctgaggaaactaccttttaggaaaggtgggccgagcaaatataaaggatgttataggattatttgttcggtccctttttctaaatgaattaaattaaagacagtaagacagattaaataaattaaatagatactgaggtaagcatggaacagccaatttctgtaactcgaagcaactttaatgactggatggttccagtatttgcaccggcaaatttcattccggtacgtggtgaaggttcacgtatctgggatcaagaaaataaagaatatatcgattttgcaggcgggattgcagtaaatgcattaggtcatgcgcatccagtggcagtcaatgcgttaacagaacaagcaaaaaaactttggcatgtcggtaacggttatacaaatgaacccgttctacgccttgcaaaacaactcactgaaaatacatttgcagacaaggttttcttctgtaactcaggtgcagaagcgaatgaagcagctttaaaacttgcgcgtaaagttggactcgacagcggtgttgcaggtaaaagtggcattgtggcatttaacaatgctttccacggccgtactttatttaccgtttcggcaggtggccaaccaaaatattcacaagactttgcaccacttccaaacggtattagccatgttgcttataatgatttagaagcggctaaagcagtcataaatgaacaaacttgtgcagtaattgtagagcctgtgcaaggtgagggtggggttattcctgctgatatcgaatttttaaaaggtttacgtgaactgtgtgatcagttcggtgccttacttatttttgatgaagtacaaactggtgtgggccgtacaggtgcactttatgcctacatgaactacggtgtgattccggatgtacttacgactgcaaaagcattgggcggtggtttcccggtcggtgcaatgttaacaactgataagtttgctccgcatttttctgtcggtacacatggtacaacttacggtggtaacccgttagcaagtgcagttgcaggtgcagtttttgagtttattaatacaccagaagtacttgaaggcgtgaaacaccgtcatcaatatttccttgatgcattaaatactttaaatgctgaatatcaagtatttgatgaaattcgtggtcaaggtttattgattggctgtgtactaaaagctgaatatgcaggtaaagcgaaagatattaccacatgggcaggcgaagaaggattactcgctttaatcgcaggacctaacgtggttcgtttcactccttctctaattattcctgaacaagatattgatgaagggattgctcgtttaaaaagagctttggcaaagttggctaaataaaaaaaaggaaagctagccatgatgattgtccgtcatgccgagtttcgagaccttgaagatatttataaattagcaggtaagtcaggtgttggcctgacttccttgccacaaaatatggatacgctttcggctcgaatttcacgtactcgcaatactttaaatggcaatgttcataagagtgaacagggatatttgtttgttctggaagataccgaagctcaacgtgttattggtgtaagtgcaattgaggttgcggtaggtttaattgaaccttggtacaactttcatgtgggaacacaagtacacgcttcaaaagcactaaatgtttataagtcattaccgactttatttttaagtaatgacagaacaggaagtagtgagctctgtacattatttttagatccggaacgccgtgaaaatcaaaacggtaaatttttatcgaaaatccgttttatgtttatcgcagcatttaagcaatattttgagaaaaaattaattgcggaaatgcgtggctactctgatgaaaatggatgttcacctttttgggatgcgattgggcaccattttttcaatatggatttctcaactgcagactatttaagtggtattggccaaaaagtttttattgccgagctgatgccacgttttccagtctatgttgaccttttgccaaaagatgcgcaagaagtgattggaaaaatgcatccacatactttgcctgcttatcatgtgcttgaatcagaaggtttacgttatcaaggatatgtcgatatttttgatgcgggtccaactattgaagcgaatattgatgagttgcgtgcagtcaaagaaagtcaactcttaaacgtcaaaattactaatgaggcaacagtgggtaaaacacaataccttgttgccaatgataattaccacgactatcgggccatgttattgaagcttgatctcgtagataacactttaaatttaacgcatgaacaagctgaaaaactcggtgtacaagaaggtcacgctgttcgtgttttatcactaaatcctatggaagtatcctgatgtcaaactctttatttataaacggtgtctggttacaaggcagcggtacaacatttgtaaaaacaaacccggttgataaccaaactgtatggtcaggcgctgaagctacggctagtgatgttgagaaagcttgccaagctgctcgtacagcattcccagcgtgggcgcgtttaccttttgctgagcgtgtggcgattgtagaaaagtttgcagctttgcttgaagaaaataaaaagcatttagcggaagtgattagccaagaaaccagtaaacctttttgggaaacattaactgaagttcagtcaatgattggcaaggttgcaatttcgattcgtgcttatcaccaacgtaccggtgaaagctcaactgaaatggcagatggtgtggcatctttacgtcaccgcccacatggcgtacttgcagtttttggtccatataacttcccgggccacttgccgaacggacatattgttcctgcgttacttgctggtaacacagttgtattcaaaccaagtgaattaacgccttggactgctgaagaaactgtaaaactctggcaacaagccggtttgccaaatggtgtaatgaatttggtgcaaggtggtcgtaccacgggtgaagcgctagctgcctcacatgaaattgatggcctgttatttaccggaagcgcaaacacaggttatcacctacacaaacaaatggcgggtgctcctgagaaaattcttgcgcttgaaatgggcggcaataatgcattgattatcgatgaaatcgaaaatatggatgctgttgttaacctcactattcaatctgcatttgtttcggcagggcagcgttgtacatgtgcgcgccgtatcttggtaaaaaatagtgcgcaaggcgatgcatttattcaacgttttgttgaggttgctaaaaacttaaaagttggtcgttggaatgatgagcaacaaccatttatgggcggcgtaatttcatcggctgctgcaacaaacatgatgaatgcccagcaaaagttgcttgagcttggtgcaaaaagcttgttgccaatgacacgtcctcaagaagacagctcattacttactccaggcattattgacgtaacaggtgtggcgggtattccagatgaagaatatttcggtccgcttaccactattcagcgttatgacagttttgatgaagcattaaaaattgccaatgcaactcgtttcggcttgtcagttggattagtttctccaaaacgtgaattgtttgatgacttactcattgaagcacgtgccggaattgtgaactggaacaaaccattaacaggagcatcgagtgcagcaccatttggtggtgtaggagcttcaggtaatcaccgtgcgagtgcattttatgctgctgactactgtgcttggccaatggcttcactcgaaagtgaaagcttgacgttgccagaaaaattatctccagggattgtgttgccttaacactagggaaagaaaaaatgaaaggatatgaagtaaattttgatggtttagtgggaccaacacatcactatgcgggtttgtcttttggtaatgaagcatcgaccaaaaaccgcaataatttgtctaatccaaaattggcggcgaaacaaggcttattaaaaatgaaagctttggctgatatgggcatgaaacaaggtgtacttgctccgcatgagcgtccacatgttccgatgttacgccgtttaggttttactggagatgacattagtgttgtggctcaagcaatgcgttattcaccagagctactgtcatctttaagctcagcttctccaatgtggactgcaaatgctgcgacagtttcaccttcggctgatagccaagatgagcgtgtgcattttactgcggctaacctgaacaataaatttcaccgttcaattgaagctgaaactacaagccaagttttacaagcgatctttaaaaatgaacgtcattttgtacaccatgaagctttaccgcaagtggctttgttcggtgatgaaggagcagcaaatcacaatcgtttaggtggtgattatgctaaacgtggtattcaggtgtttgtttatggtcaacaacatttaaataatggcttaccgggaccaaaacgttatccggctcgtcaaacgcgtgaggcaagtgaagcaattgcacgtttgcaccgtttagatgatgcacatactgtttttgttcagcaaaatccggatgtaattgatcagggcgttttccataacgatgtgatcgcggtaagtaaccagcaggttttattccatcatcaacatgcctttttaaatcaagatcaggcctttgctgaaattcgtcaaaaaatggcaagcatcggtgaagactttatttcaattgaagtgcctgaaaaccgtgtgactgtggacgatgctgttgcaacatatttatttaatagtcagattttgactcgtccagatggcggaatgaccattgttgtgcctgaagagtctcgccaaaatgctgcagtgtggagctatttgaatgacatgattcaaatgggtacaccaattgatgcaattcaggtttatgacttgcgtgaaagtatgcgtaacggtggtggtccggcttgtttacgtttacgtgtagcattaaatgaaaccgaattaaatgccgtaaatcccaaagttctcatgaatgatcaattgtttatgacacttaatcagtgggtagataaacactatcgtgatcgtttagcacaagaagatttggcagatccgcatttactcatggaaagccgtatggcacttgatgaactgactaaaattttaggtttaggttcggtttatcctttccaaaaataatgaggaggtgacatgcaagattttctagcattaaccttacaaggtgagcaacctgcaacgcgtgagggaaaacaagcaaatttttcttggcgttggttaggtgagggacttcttgaatgtacaccacatgcgcagtacgacaaagctgtcgtactgtcagctggagtacatggaaatgaaacggcaccaattgaattgctatctcatctttgcaccgttttatttgccgggcgtttaaagcttgcggtgagattattgcttgtattgggtaatccctatgcgatgcgtcaaggcaagcgttatgtacatgacgatgtaaaccgtatgttctgtggtgggtataaaaatctgcctgtaactgaagaatctaagcgtgctgaggttttagagcagactgttgccactttctttcaggaaagttcgagtcaggcaaaacgttatcattatgatttgcacacagcaattcgggcttcattattaccaacatttgctttatttccatatcaaacgcatagctatgatgctgatctaacggcaagtcttgaagcagctgatttggatgctttggtttatcataatgcggtaggtaaaacgtttacccattttacgagtgagaattttaaggcggcgagtgcaactttagagttaggcaaagcattgccatttggtcaaaatgacttgagtcaatttgcttcaattgatgaagtcattcgtaacgtggtttctgagcaagctttaccagtgcgtaataaaccaaaaattcgtgtgtttcaggtatctgactctttaataaaaagagatgaagagttccacatgaatttatctgctgaggctccaaacttttcaacttttactaaaggcgaaatcattgcgactcagccttctggtaactatgtagttgaacaagatcaggtctggattttatttccaaacccgaatgtgaagatcggtttacgtgcaggcttggttttaactgaaacaatctgaataattaattttagacaaataaaaaaagggcgatgaatcgccctttttttattgctaacttaattagttagtaccgaaaagacctttaataaaagatttcttttcgcctttttgtgtagacgcttgagcgcctgcatttacgtttgcatttgcattaataccagcaacattaacaccaacgtttacacctgtttgagcgttaactccatgagctggttgagctgtatttaattttgcttgagcatcagctttagtgtcagcaacgaattctttttgctcagcttgattttgtgctacacgagctttaacagcatctacacgtgcttgagcatcggcctgtttttcagcagtaaattctttttggtcagcttgtttttctgctaccttagtttttacagcatcaagatgcgcttttgtatctgctttagcttcaactgctaggtttttagtgccagttgcagccttagtcgctaaattttttgtacctgttgctgcttcggtagcaaaatgtttagtaccagttacagcttcacttgctacatgtttagtgccagtagcagctttagaagaaagttcagttactttacctgttgttttttttgtagctttaacggttgtgtcagcagctacgtgaccagcatgttttgctgtgttccctacagtatgtgcagtatttttgactgtattggctacgccactaacaagaccacctggttgtacgttgacttgagcagatgcacctgcattaacgcccgcactttgtgcaaaaatagaggcagaagcaagtacacttgcagtaacgatagctgttttcatcattttcattgcgatatccttcaaagaatatacccttttagtgaggtatttcataaacgcaatcgcatcatagctaaggaaatatgagcttgggaactcacttcatcaaaacgttacaacagtgttacattgagtaaacagactagggataaattgtgaagattaataaaaattaataataaagtgaaaaagaacatttattttttagttattcttattaagctggtcctattttcatcttacagctttttaacctttatctcctaaatttttctatcgttgttcatgtgatacatgcctatatctctaaatgtgatgtagttctcgttatttgttagaggaaacggcataataattgcttattatgagaatagggtgctttttagcacttttttgaaccttattctgccagaaatataaacgtaaagggcagaactgtatttttgcttattcgagaaaagatattttagcttttctcatgtttatacattttacgaaatagaaatttcacatgaaatgtaactcaagaaatgtctctttatttcgaataatcaaaagtaaatatagatgtctataaacaaaagaacagagatcttaaatgatgaaaattatagcttccctacttgtaatagtcggcttgatcgccgttgttctttatttcaaacccacaagcggtgcatctgatgtgttcaattctgctttacatgagacgaattcaccgcaaacagatacttcatcttccctttctaaacttaaggagcctactcaacttaaaaacgtatctttaaattcaaaccactctcaaccggtatcagcagatgccgttcctttctatgacacaaaaagtgatccttcgattcaaccgattgatccagaaaaagatccagcaaatgaaataaaagcgaaataagcaaattgttagttgaaaaactacggagaaaaataatgcaaagtaaaacgttgtttctattaggtctatgtacaattttcagtacaactgcgtccgctcttcctttggactccaaaggggccaaacagcggttaagtcaggcagcaaaacaaaaagtattccaaggtaaaatagatttagatgctttggttagtaatgattcaaacgatttaattgtcgaatacaatattccttcatcgagcgtaccttcaggtttagaacggcgaagttatattgctacaaataaaaagaatcttcagacaaggtttaatcgtgccggtggtgtacaagtacttcgggattacaataacctacctttggctttttatcggattagtaaccgtgaggctttagtagctttattaaatgatccgaacgttaaagcagtttatccaaaccgtattaaccgtactacaactactgaaagtttgcctttgattaatcaaccacaagccaataccaatggttttacgggggagggatctagtgttgctgtgctggatacaggggtaaattatctacattcagattttggatgtaccgctgtgaatactccatcgagtacttgccgcgtggtttattcttttgatagtgcaccagatgatggcactttggatgatgatgggcatggtagtaacgtttccgctattgtgtcgaaagtcgctactaaaactaaaattattggtattgatgtatttagaaaggtcagatcgcaaggtaagtgggtaagcaccgcttatgatagtgatattctcgcggggattaactgggctgtaaacaatgcacaaacctataatattaaagcggtgaatttgagccttggtgtgccgggagtcaaatatacctctgagtgtagcgatagcagttatggaacagcatttgccaatgcgcgagctgctggcgtggttccggttgtagcctctggtaatgatgccttccctgacggaatttcatctcctgcttgtgtggcaggggcagtaagggtaggtgctgtttatgatagtaatattggtggtgtgtcatggggtaaccccgtgaaatgttctgaccctactacagcagcagataaggtagcctgctttagtaatgggggaagtcttgtgactttattggcaccgggtgcaatgattaccgcaggtggctataccatgggcggtacctctcaagcgacaccacatgtggcaggcgcgattgctctattgagagcgaatagcgtaagtccaaccgaaagtatcgatcaaactattagtcggttaaaagctacgggtaaacctattactgactcaagaacgggcctggttttcccacggattgatttgctggcggcaaccaatggtttaaccgttaactaaatagcatatttataattttttattaggtccaaaaatttaaatggctatggctcgttgcaaaagataacttctgcaacgagtttttttatgaaaaagccttaatcacactttgctaagttgtctttactaaaattactttgaagttttttgaagttattttgaatttcgggatcttggatattaaaagtggtagagcttttggttgtcgaattggtcgcttgacttaatatgccagaagagtctggatattgttctgtaaatgattgagctgaaatcagacctttattattaaaaatccaatgttcagttacttgtccaccacctaaataacccgtaaattcaatcatacaagcttgcttatcgtgtttaataagcttggctacattgcctgtggtggttggataagcttcgatattggtatcttgttctaaaacttgtgcctgaggataagaagaaagaggtgcggtagttgcacatgcagttaatgctaagcagcacagggtagaaaagagaagtttttgactgttcataaggcaggttcctagctctttgtagtggatgtatgtcttttttaaagtgtgtttctttggaagcgcgatatgatcgcgctaatctggtttaatcttaattggcagtcgtactagatttacttagctcaccttgttcgattggaatattttcaccgtttctactgctggtgatattttgcttagcttgttctattttctgttcagtaaatactttggctgtatccgttttttgttgaacaacttctgctttttcggcggtaaattctttcgtatctttccatttttcactaattttatttgaagttttttcagaagcgccttgaatggaatctcctaaattttgaattccttttcctgttttgtataacagtacgcggcctaagcttggattatcgccataaggcattgtcttagaggttgcttcattcacttgttgaggttgaggtgtttcagcaaagagagatgatgaaaccaagatagagcttgtaatacataaaatttttatggctttcattttggattaatctccccaatgactatcaaaatatggatagctgatcttactgttaaaaataaatcttgtgcagacatgagataaaacccatacgattcgattacgagaaatcatcatttgaagggaatagcatcattacccaaatactttataaacaaaactcagacttaatcaattctataaacatgtctctcgctttatggttactcacatttttatgccagaaaaaatgattttgcataaaggcaaggtattcgaatttataactttgaatatgcgctaaatttttatattgctcataaatactcttaggcactaacgccacgccagaacccgcactgacacacccaataatggtggcgtaactggtaatactggtgatagggagagagatattcttcagtttaagccattcttcaagagctgcgcggtaaggacagccttcagtccacataaaaatttctttaccaatcagatcttcttggcaatgaatttctcctaaagaatgagatgcaattaagaccatgtcttcttgataaatactcagtttattgagcataggaaactcaatattgcctgcaacaattgcaccatcaagtttgtgctgagaaatatcgactagtagctgtttccatgtgccagtaataatttgaatagaaacttctggataacgttgatgatattttgcaagtaagttaggcaggcgagttgtagcagaagattcaatagctccaattttgagcgggccagagggcggtgcatctggatgaatacttcgtttcgcttcatcgcatagcgctaaaattttatggcaataatcgagaaagatttctcctgatggggtgagttttaaagctttaccttcacgataaaacaaaggtgctccaagctcttcttcgagttgtttaatccgtgtcgtaatattggatggtacacaatgcagttgcattgatgcctttgccattgttccgcattcaaccacggtttggaacatctttaactgagcgatatccatgttttatcattcacttttaatgaatattaaactcaatataagttaattttattcaactatccatgcgcatatgatgaaagagttccatttcattagtgcagatttaacatggcaatttctcttgctgccgaaacccagcctcccgcatttaagctctacttatgtattgctgtaaccgtcttttgttggggctattcacctattggtgtacatagtgctttgcattcatatacaccgcagcacattgccttgcttcgctttttgattgcatcggttttcttgctgcttttggttatgaaaaaaggaattcagcctttaaagtggaaagatgttcctgcacttgctgtattagggtttttttctgtaacgctgcatcatttgctgataaatacggggcagcaatatgtaactgctgtcgcatctagtattttgagccaatctattccgctatttacctttattatttcggttttgctttttaaagaacaaatcagttttaaaaagtggttgtgtattttgctagggctttgtggcgccgtgttagtggtcagcggagatcatggttttggtatgccgagcccttatagtttgttgattgttttagctgcaattgcatgggggctttattttaatttatataaaaaatttgccttaaattatgatgccttgagcatgatgtgctacatcatttggttcgggacccttcctttactattttatagtgctcatttacctaatgaaattttacatgccacttggcaagccaatatgtcggttgtcttattgggtatttttccaagtgcgatggcttatgtactttggggctatgtacttaaaaatatgccgttaacgattgcatcgaattttttatattgctctcctattgtcgcgatgaatttggcggtgattttcttaaatgagaaaccatcaatgatggtgctgctgggaggagtaattattgtgggaagtttagtgtggatgaattgggggaatcggcgtactatcgaataagctatgtcatgcgctacttgctttaagagaatgagatgattgttgttactttaacttataaaaaaccgttagccgaagttgacgctgtactcaaagaacatattgcatttttagatcattactatgagcaaaagaaatttctggcatcaggtcgccgtgaaaatagagtaggtggggtaattttagttttaagttcttctattcaagaagctgaaaaaattataaaaaacgatccgttttatattcatgatgtggccgattatgattttatgtggtttgagccatcgaaaagtttagaagaaattaaagagtttgtttaactcaaaaaataaagggatctataaaagatccctttatttcataataagctaattaaccctgcaacacactcacatcagcaacagcagtaaacaagttacgtaactgagccaataaacgtaaacggtttgctttcaggtcagcgtcatctgccatgaccattacaccatcaaagaatgcatcaatcggcgcacgaagtgctgcaagcttagaaagggcagcagtatagtcttttgctgcaagtaatggttcaaccacaggagtcactgcttgaagctcagcaaataatgccttttcggcatcttcaaccaagttcgcttcaattacagagccttctggtgctgcttcttttgcaagaatattagcaacacgtttatttgcagcagcaagtgcagcagcttcaggtaatgtgcggaagtggttaacagcatttactcgcttgtcaaaatcaagtggagattttggtgcaagtgcttgaactgcttgaagtacgtcaacagcaacaccttggtcttcgtacttagctcggtaacgaccttctaagaatgcaaccgcatcagcacgagttttgtcgtggtctttaacgatatcgccataaccttgaagtgcaagattaactagctcttcaatcgttacatctaattcattttcaatgattaaacgtaagataccaattgctgaacgacgaagtgcaaacgggtctttagaacctgtaggcgcttgtccaataccaaaaataccaacaagcgtatctaaacggtcagcaagggcaatagttgtacctgttttggtttttggtaaaacatcacccgcaaattttggtaaatattgctcacctaaagcttctgaaacttcagtgttttcgccttcaatacgcgcgtagtaagtacccgcaataccttgaagttctgggaattcaccaacaagctcagaggttaagtcgcatttagcaagtaatgcagctttttcagcatcagctgggtttgcaccagtgattgaagataatgcaactgcaagttttgcaatacgtgttgatttgtcccaaagcgtaccaagctgtgcttggaataccatgtttgctaatttttctttacgagatgcaagcggttgcttttgatcttgtaagaagaagaactcagcatcagacaaacgagggcgaacaactttttcgttaccttcaataatttgagtcggatctttagactcaatatttgaaacagtaataaagtaaggctgtaatttaccttccgcgttgatcaaacagaaatacttctggttgtcttgcattgtcgtgatgagtgcttcttgaggaacagctaagtagcgttcttcaaaagttgcacgtaaagccacaggccattcaaccagacttgttacttcatcaagtaagtcagctggaacaatcgcagttgcattcacttcatcagctaactttttcacttgttcttgaatggttgcctgacgcttttcaaagttcgctacaacatatgctttttctaacgcagctaaatagtcatttgcatgcgctaaggtcacagcttcaggtgcatggaaacggtgaccataagtcacattaccagctttgtgatcttgaatagtcgcctcaataacttggtcatctttgagtaagacaacccatttcactggacgtacaaattcggtacggcttgcagcagaacgcatgcgcttagcaattggtaaattgtctaacgcagtttgtaaaatctgtggaagtaaagcatcaaggctttgacctttcacatcttttaaatagcaaactttttcaactttacctgcttggaatgtagaaagctgatcaacagtaatgccttgaccgcgcataaagccttcaagtgctttagtcggtttgccttctgcatcgtaagctgcttgaacagcagggccgtcaaaacgtttttgtgtatccgcttgagcagcatctacatctacaattttaagcgctaaacgacgtggagctgcataagcttcaacagatgcgaagtctaaacctgcttcatttaagccttttacagtttctgcttgtagtgcatcacgtaacgtttttaagctttttggtggaagctcttcacagccaagttcgaataaaacagtatgtttgctcattagtttttctccgcctttgctgcttcactttcagcttgtgcttttagctgtgccaatacttcatcacgtaaatgcggttctgccattgggaagccaagctctgcacgtgcttgtacataactttgtgcaatagcgcgcgccaaagtacgtacacgtaaaatgtaacgttgacgctcagttacagaaattgcaccacgtgcatcaagcaagttaaaggtatgagacgctttaacgacttgctcataagctggaagtggaagtttagcttccattaaacggttagcttctgactcgtagaaatcaaatagttcaaatagtttgtcaactggagcgtattcaaagttataagtcgattgctcaacttcattttgatggaatacgtcgccgtaagttacagtaccgaattggcctttcgtccaaacaaggtcataaaccgagtcaacgccttgaaggtacattgcaagacgttctaaaccgtaagtgatttcgcctgttactgggtaacattcaacaccaccaacttgttggaagtaagtgaactgagttacttccataccgttaagccaaacttcccaacctaagccccaagccccaagagttggagattcccagttgtcttctacgaaacggatatcgtgagtaagcgtatcaatcccgattgcttttaaagaatcgagataaagctgttggatattgtctgggtttggtttaagtactacttggaactggtaatagtgttgcaaacggttcgggttttcaccgtagcgaccatcttttggacgacgtgaaggttgaacgtatgccgcgttccaagtctctggccctaaagcacgtaagaatgttgcggtgtggaatgttccagcgcccatttccatgtcgtaaggttgtagtacgacgcagccttgttcggcccaatagttttgtagggcaagaattaagccctgaaatgtatcaatgtgcgagatggcgcgactcatgtagcatccacgaatttatgagaaaaattgccactaagtataaggattttgtggtggagtggcaaaggcttaatcaagggaatacatgattcggtcatttgtttttctggcttagccactttaagcctaaccaatagcaaaagcctgtaaataagatcatcagatagaaactgtagatcttataaatatgccaccaaggggaagggaatgatccgacaaaaatcaaatgtgtaatagggccaatcaaaatccagatcgcagttgtgctgatgaaaatactcatcagatttaaacgatttttacgggcgagaaaataggaaatgatatatacaaaaggaataaccagaaggccataaaaaagtaaataaaataagaagtgggctagaaaaacaactccaatcgaataaaggttgaactcagcatttaatattattacccctaaagcagataaactcagcaatgggatgggtgcaagcgcaagtgcgtgaataatcatttttttgttatattgaagcatattaaaaattatagaatcgagaataaattatgctgaaattttgctgcaaactcattgttttatctagcctttttggtagtccatggttgtatgcgcagaccgaagctgacgagcaagacgagtacaaccaatgtgtagatcagactattaaagaaatgcagcttgagagtattaacaatatggtcgtgcatagctgttctgaacaagctaaaaagacttatgaagaaaaaattgttgctctgattgatcaaattcgtacacaaagcgaagaatataaacagccagaacgttaccaagatattttaaaatctcaacgactctggaaagcttatgtagatcaggaatgtaataatgcaggctcatacattggctcacccatgtattcgtattgcccaatgcaagagtatgcagcgcgtgtaaagcagcttgaagaatacgttaattaagacgaattattttaaacgtcacctcatgacgctgagcgtatttcactggattaaatttaagaatgcgaaatgatattttttaaacgatgccataaatgagtcgtttgatatgtctgatcgcattcgagaaaaactacaaattcttgctgatgctgctaaatatgatgtgtcttgttcatcaagtggcagtgatcgtaaaaacaaaaataaaggtctgggggatgccagtcattcgggtatttgccatagctataccgaagatggccgctgtgtatctctcttaaaaattctatttagcaatgtgtgtatttttgactgcgcctattgtgtttcacgccgttctaacgacgtccagcgtgcagcatttacggtgcaagaggttgtagacttaactattaatttttaccgccgtaattatattgaaggcttatttttaagctccggcatatttaaatcggccgatcacacgatggagcgcatgcttcaagtcgtgaaaaagttacgtcttgaagaaaattttaacggttatattcacctaaaaacaattccgggtgcatcgcctgaactgatccatgaagcaggtttatatgctgaccggatgagtattaatttagagatgccgactgagattgggttaaaaacttttgcgccagaaaaatcacatcaggaagtacaaaaagatttaggtttagttcgtgaccggctcattcaactgaaagatgagcgacaaattattaagcacgtgccgaaatatgtaccagcagggcagactacgcaaatggttgttggcgctcatcaagagtcagaccaagatgtcttgtttatggctgacaaacactataaagaatttaaactcaaacgtgtctatttttcgggttatatcccaattaatactgaaaataattatttgcccgcagttggctctgcaccgccattattgagggaaaaccgactctatcaaagtgactggctgatgcgtttttacggttttgaagtcaatgaaatcgtcaatgaaaaacaccctaacttagaccttgatgtagacccaaaattaagctgggctttaaggcatcctgaacagtttccggtagatttaaaccgtgcagattatcaaatgattttgcgtgtaccgggcattggtgtgaaatcggccaagaaaattgtgcaggctcgccgttttgggaaaatccatatcgatttacttaaaaaactcggtgtggcctaccaacgagcaaaattctttattcgctgcgaagacagtccaaaattccaaaaagagctatcatcaagttttattcggcagcagattttaactcagggatcttctaaatatgtgcagcaactctcgccacaattaagccttgggttttagctatgtttaatgaggaagtagcttactattttgatggttcaatggttgggctgctgagctgtgtatttcgtgcatttcaatttaaagaattacaggtcaggctctgtttgaatgatgcagctcaacatggcttatttgctgataaaattgaggtttcaaataacgagcaacacgccgagcgtgtttggtccgcgctacaaaaaaagctttcatcttcttccttaaaacaattttattttgcctctttatctgaatctttagacgcctatcagcatttatttaattactgtatttatgtgtttagtagtcattcttctgtagaaaaagattattcacatcccagtgttttagcgattgcacagtggacgaaaaaggtcgggcgtgagaagcatcgaatggaggcttttattcggtttaagaaaaccaaagatgagctttttttaagtctggttcgtcctgattttaatgtcttaccactcattcagccgcattttaaacggcgttatcaagatcagcgttggctcatttatgatgagcaacgtaaattcggactgtattatgatttacgggaaatacatgaagtttcactcgaagcctcagacgttgaccgtaatttaaaaaatggaatgagtcaaagctttcagcttgagcttgatgagcaggaagttttatatgatcagctttggaaggattattttaaaagcgttaatattacggaacgccaaaatattaagcttcatgtgcaatatttgcctaaacgttactggcgctatttaaatgaaaagttaattgaatattaaaatattaaaatagtaagagcacattcaacaggttttctgataattgaaagatataatttaaatgcactttatgtggctttgggcgtatacttttgcccgttataaataacggcatatcccctaaggtgtactgtgagtgttatacagccagaatggttacagattttaaaaccgaattttaaggttttacccctaaaagaacggttgctttgtggcgttggagcgctatgtggtttagcaatttcctcgttaattagctggtatgttttaggcggaattaatgcttggtacattgcaccaatgggggcttcatctgttctcttatttgctgtacctaccagtccattggctcagccttggaatgttattgtcggtaatacattagccggaattattggggtcgcctgtgcacagtggattcctgatttaaccacggcttttagcgtggctgtgggttttgccatatttttgatgatgactaccgactccttgcatccacctagtggggcagttgcgattacggctgtgttgggcggtgctgctattcataaattaggcttttatttcgttttttatccggttctgctcaattcattacttctactcggttttgctgtattttttaatcgattgattgggcgacattatccggttactgcacatttaaatgagcgtagtaaagatccaactcccactcaaaaagtatcaattcagccaaaagatattgagtatgcgttagaacatcatactgaactgttagatatcagccagtacgacttagaaaaaatcattttagaagcgcaagaacatgccaatgaacgtatggtgaaccaatatacctgtcaggatattatgagccgtgatgtgattaaattgcatgaaaatgatgatattcatcaggcattagataaatttaaacaagaaaatctcatgagtttgcctgtagttaatgcagacaaccatttagtgggtactttggcgttatatgaagttgtggaatggtttaaaggggcaacagacccaagaaactcatggcagcattacgtaagacaaattatgagtcgtcgagtagttactgtactgccaactcagccgattcaagaccttgtaccttactttgttgagaagtcttttaactatattccggtggttgaggaacgaaaactgattggaatcattagccgtgcagatatgattgcggctttacaacagcagttaaatcgtaaattgtaattttaaacataaaaaaagctacggttgattaggggatgcaaccgtagcgaccaaaataaactaagttatttaatgtatttgttcttctcgtacagtgcgaacaggttgttgataaccttgtacttgttctggctgttttttaggaattaccaaccataaaactaagtacactaaaatccctggaaaagccgcgctcattatcgaaactaacacgaaaataatgcgtaataaatttgcattccaaccaaatcgttcagcaataccgcccattacaccggcgatcatgctttgtcggttcgagcgatataaaccagaattggccatctaagtctcctcaaatatataagttacaaggaatcatttattcacttggttaataagaatatggagccaatccgaatgaattaaaggttcacaaaactaaaaatggttaaaatatgtaaatggtttaaatcaatgaaagcaacatctactaaaatgcactgtttcggggctgaaagtgtttgtagcagcgatgatatcgttcctgaacaataaggttgaactgtagcattgctgttgtatgtgaatgatgtatatgtctttgaagtcgtctggtcttttaatgaaacatttgggtgtggcagccatcttgtgtatggggttaagtgcctgtgatgtaaatcatgccgactctaaagatcactccgcggtagcaacgacttctagacatgaagatagtttgattaaaagcaccactaaggttaaaactctagatgatgcagcgggacgaactttcttgcctgagggcgtcccagatcaaacctcaaaactatccgaagcagaccaacaatatgcaggccgttatcatactcgtatttcatgtgaagataattttgccgattgtgaaacaggcgaggcagaatatattttaaatttattacctgatggaactgcgtattggaatgttgttcattttggtcgtgttggtagtaaagatggctcaaaaagtgcagtcatcaatcaattatgtccttccttgaaatggaaggtcgaacctgccgttcatgagttaacgattcaatgtcctttatcagatgttaacttctattttgatattgatgcaaaacaaagattagtcgtaaatttagaaaaattattttatagcgattttggtaaaaaccgtgagtttttggaacaaaattattttgttcctacaaaagcttatgtacttgataaagagtaaagtcaattttagcaaaatcaaaaagagcgcaatatcaattgcgctctttttgattttagagtctatacatcattagtagtcgaaactaaagtgttccgctggtaatgaagtcagcgtacgagaagtcgttaccattgactctgcatgaccttgagcacgtggtaataaacggtcaaagtagaaatctgcaactttaatttttgctttatagaactcaggagtttcttggccattacctgcttctaatttttcagaagcgacaactgcttgttgtgcccagaaataagccatcatcacatagcctgagaacatcaagaaatctacagaagcagaagatacgatgtcacgatctttacgtgcagcaagcatgatacgaacagttaaagtgttccactgagcacaaagctttgttaagtcccaagcaaaacgacgtaagtatttattacgcgcatgtgcagcacagaactttaagatctcagcagtgtattcacgaactactttaccttttgagcttaacaacactttacggccaatcaaatcaagtgcttgaacaccagttgttccttcatacagagtagagatacgggcatcacgtacgatttgctccataccccattctttgatgtaaccatggccgccgtacacttgcataccgtggttagcagcttctaggccaagctcggtcaagaaaccttttaagattggtgtatagaaaccaagtttatcgtcataatcttcaaatgcagcttggtcaccgcgtgtcaaagcatctgtcattttgtcagcaagctgtgctgcgtagtagatcattgaacgaccaccttcagcgattgctttttgagttaacaacatgcggcgtacatcagcatggtgaatgattgcatcagcaactttatctggatcttttttacctgaaagggcacgcatagacatacgttctttggcatatggtagagcgccttggaaagataactctgcatgggcaataccttgaaccgcagtaccaatacgcgctgtgttcataaaggtaaacatggcatgtaggcctttatttacttcaccaatgaggtaacctgttgcattatcgaagttcaatacagcagttgcagaagcacggatacccattttgtgttcgattgaaccacaacttacagtattacgttcacctacgccgccctccgcagttgggataaatttagggacgataaataatgaaataccacgagtacctgctggtgcatctggaagacgtgcaagcacaatatgaataatgttttctgttaaatcatgctcaccggcagaaataaagatttttgtaccagaaatcttataagtgccgtcagcttgtggttcagctttggtttttacctgacctaagtctgtaccacattgaggttcggttaagcacattgtgccgctccatgtaccttcaacaagtttcggcatatacgtttgtttttgctcatctgtaccgaattgcaaaatagtattcatacagcctgaacttaaacctggatacatggtaaatgaccagttcgcagtacccatcatctctgatttaatcaggtttaaagacattggtaggccttgaccaccaaattcttcaggataagaaagaccttgccagccacccattacaaactggtcataagcttctttaaaaccttttggcgttttaacttcgccgttgtcaaaatggcaaccttcttcatcgccagattggttaagtggagacaatacgttttcacaataatctgctgcaccttcaagaatcatatctactgtatcaggatctgcactttcaccatttgataaagttttgtagtgagcaggatagtctagtacttcattcattaagaagcggatatcgtgtagcggagctttatatgctggcatggctttaatcctaattttgaatcattgtgggattatctgaatcgatgatttgattattcactcgcatgataaaaatacaatgttaatcgcacccgaaaggaatgtcagaaaagcgaattttgtcgaaaataaatacacctgaaattataatttctgctaaagtcgggacttatacttttatgtgaaaaaacaactaatttttttatttttagcaagttttgttaaaaagataaagcgataaggttttaaaaaaggttatgcatttaaaatatctcagtttatgtttatttagtttgggcttgacggcatgtgcacaacacggcgtgcgtccacaggtggcatctgcgagtttagagcaaaaagccattcaaagtgttaatgcgatgtatgaatacccaagttatgattatcgcggaaactttaaaattaccgttgatccttcacaaataaagcaaaatgtaaaagctgagaatactgctaagctagatgctgaattacaaaagaaagttgatcaatatttacgtgaacaaaaagttgccttaagtaaagcacagaaacaaaccttatatacggcgattgcaaacgaacaaggtgatttgggactgacttcctcagcacgttctgaaaaaattaataccgtattatttaatttgttaaatgatcttcagtttagttatgacggctcgatacattatcgtcaaaaaatgggttcatttaatttaactgctagatatgaaaaaccgacacttttagttcaggcaaaattgccaatggtgcttgatcttgagaattataagttttacataaattattttggtttgatgccatatttggttaataaagataatcaaaataatttggcttatgttgatttctcaaaatataaagccttctttaaaaatgtcgataagaagaaatttattgaataccttaaagcttcaagtgctgtttcataccgattagctgaaccgcaaaacctacaacgtgtatcgttgactgaggctgatcgtaaagcaggggcggttgaaaaaattcgtttaaagacgacggttgagcaactacttttagaagtagatttgtttgggcaagttaatgaaaaatatcttcaaaaaagtgttttaggtcttgatgaggaaaaacttgctgaaacgcttgccgcagagattgctgcttctgatgcgaaaaaaggcactgctggtaaagaagaacaaaaggtttcttctgatgacgccgctgctgttagccaacagttgtactcccttgttaatgctcatttaggcaatacttctacttctgaagatgaggaaatagagtctgcttctagtgaagaggcgagtgatgtagctgtagcagaggccgagcaaacttcagaaaatgaagaggtagttgcactgacggaagatcaatgtattgaattaaaatcacttaaaaaaccggtcgctttaggggatattaattattgccaaatctacggtattgatgttctagatcagagtgatacaagtattcaaaaagcgcaaatcaagtctcgtcaggacgctttaaagcaaacttttgaagcttataaccaaaaccagtttattaatgatgaagcattcaaagctctttggttaaaacataaggatgaaattgaacaagctttaccgaagcaaagaaacccaatcacaattgatgtggctttagatgacaaaggccgtgcagtcaatatggattacgatgttgattatacgccagctgagtttaagcaccgcttcaatattaaagcagatatgcaaattctgaattatgggaaagcgacttcaattgatcagcagcagcttaaacaagctaaatctgtggctgaagcaagtaaaggttctatgctggaaaactttattaaaggttttagtgaaaagcttgggcaaagtgatgtttcagagcaccctgtgggcacacatagtgatgtacaagatttagatgcaaatctggctgtacttgcagataaaacctatgatgcaacgcatgcttatgataaaacttataaagcagtatttattgccaaattgactgccgaaaaaccgtcatatattaagtattattcagttcaacaactccaagaaattgctgaggtttatgcttactggttctctgatgaagatacatataatcctcaaggaaaagccttagagcgtattaccgctttacagaaaaaacatcatcttgaacaagatgatcagtttgaccacgagttaggacgtgctgtagatcatattgtattaacaactatacaaggtaaaacagggcgtgaagcttggcagaagctacagaagcaatataaacagccagcccaacttttctcaaaacagtatcagttagagtttgaaaaacaaaatggtgtttctgctgaagaaaagcatctgttatcagaaacggctgatattttagggaatgtttatgtggctgctcgtaaaaaacagctttcggaaaaaacaattcagaacttaaaacctgaacataatgaatttatcgattatgaaattttccgtgaggtttataagcaaatggttgccgctagaaaataataagtaagataaaaaagaacctacatatgtaggttcttttttggtttatagaaaatcttttaattgtggtcgtacattattccagatagagaaggcttcaatagcttggcctactaacatgccaaaaccttccgcataaggcacattacgctgtttcgcttgatcaaggaaactagaaggtttgccataagccatttcataggcatatttaaattttaatttttcaggtagttgtaaagcatcgcctgaaagacttgccgaagttgcattaatcacaatatcaaaatcgccttctaaatcatttagggaaattgcttgtaattgggcttgtggaactgctgtttttaagtcatctacaagttgttctgcacgagctaaagttcggtttgcaatgacgatttttttggcaccagcctgtacaaggggataaataacaccacgcgttgcgccgccagctcctaaaattaaaatagttgtattttcaagattccattctaaagcttgaattgcggcaactaagccttggccgtcggtattgtcaccatgcaatttgccattttccatccataaggtatttacagctttagcaatttgagcacgctcggttaacacatcacataaagcaaaagcttgctctttaaaaggaacagtaacgttcataccactgccgccttttgcaaagaaacttcgcatgctcgattcaaaaccgtcaagaggagcaagccgtttttggtagtttagatcaacacctgttttttcagcgaaagcatgatgcaattcaggagagcgtgattgttcgatcggattgccaattactgcaaactgtttggtcattcttgtatccaaaattttaaaatggcatgaagcagatagagcctgcactgaatattcagcaggcctcactataagtcaaaatagcacaagaaaaaatatttgaatgaaggcaaatagaaatcaaaaaaggagattctttagggtggaagccaaagaatccccaaaacaaaaaattaggcgactttttcttctaaacctaaccaatcacgaggttttaaatagtagtcagttaaacgcttctctggagagtcttcatcccattcagggcgataagaccatgcagctagattaggtaagctaactaaaatcgactcaatacggccacctgtttgtaatccaaacaacgtaccgcggtcatacaccaagttatattcgacatatctgccacggcggtaaagctggaactctcgttgagcttcggtataaggctgttcgcggtgtttttcgaaaattggcaagatcgcatttaaatagccattacctactgcttgaatatatttaaagcaggtttcgaaatcccagcaatttaaatcatcaaagaataaaccgcccacaccacgttgttcatcgcgatgctttaaatagaaatagtcatcgcaccattttttatgttcagcataaacattgtcaccaaaaggcttacacaggtcataagcggcttggtgccaatttaaaacatcttgatcatctggataaaatggcgttaagtcaaaacctccaccaaaccaccaaatcggatcttgaccttcacgttctgcaacgaataagcggacattcgcatgcgaggttggaatattcgggtttttagggtgaatgactaaagacacacctagcgcttgagcttttgcccctgcaatttgagggtgacgttctgttgcagaagcaggaagtttgctaatgttgatatgtgaaaacatcacgccgcctttttcaatcactgtaccattttgcagtacacgtgaatggccgccaccgccttcagggcgctcccaatcatcaatgataaattctgctgtcccaccaccagctttttcttgttgttctaaaccggcacaaatacgggcttgtaaatcgaggagaaattcgcggacacgttgaatatctgttgaagtcggatgttgcataatgaccctcaaagatgatcgaaatagattagatacatcaaaacataaatccataaaaaaagtaagggattttttctaattcctgaaaaaatcccttaaatataatttttaaattttggactcgaaatcaaaaatcatctttttggtaaaggtgatccattctttcacgtttggtttttaaatattgttcattaaaagggttacggccgacagttaaaggtacacggtctacgacattaataccttgatctttgagtgcctgaattttcaaaggattattggtaattaatttaacttctttcacttttaagtggtcgagcataatgctgcacatatcgtaacgacgtgcatcggcgggtaaattcagtagtaaattggcatctactgtatcgtgcccctgatcttgcagggcataagcacgaattttattggttaaaccaataccgcgtccttcttggcgtaagtataaaattacaccttgtcctgcttcattgatgagtttctgagtggcttgtagttgtgggccacagtcacatttcaatgatgcaaatgcatcacccgttaagcattcagaatgtacgcggaccaaaacaggacccgttggcggattttctaaccctttggaaagtgccacatgttcttcacctgttacgggatcttgaaacacagaaatattgaattcaccaaaagcggtcgggagttttgatgttgcaatgaactctataggcacagattaactcatcttttaaccgaaaacggtttaaagtatagcgtaatgctgggagattggtcgaattgtcataatcattttgcacactaaggttttcttttttgtataaagaagacgataatagttgataaatagtcagattattcaggataatctgccaaccatacccatactgtatgagagactgctttgcatgatctcgttcgcaaatgtggctgattgaaggtgacttcattcgattgtatgatcgacccattttgacccagcttaggatttgccaggcttataaaggctttgccacatatgttgtataccgaaattccaactcaacgccctgttacgccattgttagatgcgattgatcatcctcaacaattacgtcagctcgagcatagccaattactacaagtggctgatgagttgcgtcaatatattttatatgcagcaggccagagtggtggccatttcggtgctaacctcggcgtggttgagctgacggtagcgctgcattattgctttaatacaccaaatgatcgtttagtttgggatgtgggacaccaagcatacccacataaaatcctgactggacgccgtgaacaaattacgaccattcgcgctaaaaatggattggctgctttccctgccagagaagagtctgtttttgatacctttggggtagggcattcttcaactgctatttcagctggtttgggtatgtctttggcacgtcgctatcagaaagacccatgtgaagtcgtttgtattgtgggtgatggtgcaatgactgcgggcatggcatttgaagcaatgaatgatgctgttgctcatgatgcagatttaattgttgtactcaatgacaacgatatgtcgatttcttgcagtacaggtggctttgccaaacatttagctgcaatttgggaaaaaggtcatttagttaatgtcaatgaacatggtgaagcttatatccagccacacccaaaatggacatataactctcgattacaccaatcggcaaccgatgcggcagataatttatttaaagcaattggttttgattatttcgggccttttgatggacacgatgtcactcagttggttcaggtgttcaacgcgctcaaaaaacgtaaaggtccacgtttagttcacgtttataccaagaaaggtaaaggctttgctcctgctgaagcagatccgattacttaccatgcgattggcaaaattaatgctgcttcgggcgggaaaacaccaccaaaatactctgatgtgtttggtgagtggttgtgtgatgaagctgcacaagatgagcgcttgcttgcgatcacgcctgcaatgtgtgaaggctcgggcatggttaaatttgctaagcaatttccgcagcgtttcttcgatgtcgcgattgcagagcagcatgctgtaacacttgcagcaggaatggcatgcgaagggctaaaacctgttgtcgccatttattcaacattcctgcagcgtggttacgatcagcttattcatgatgtcgcattgcaaaatcttgacgtgacttttggtattgaccgtgcaggcttggttggtgaagatggtccaacgcatgcaggtgcatatgactatgcctatatgcgtactgtgcctaatatggtgatcatggcaccgaaagatgaaaatgaatgccgtcaaatgcttcatacggcctatgcctataatggcccggctgcggtacgctatccacgtggtgcaggtgtgggcgtcgaaatccaaaaagagatgactgttcttgaattgggtaaagctgaaattgttgcagaaattaaagcaaacagtgatgagcagattacggttttagcatttggtagtcgtgtcatggttgctctggaagcagctgagcaatttgctcaaaaacatgacgtcagtgtgtgtgttgtaaatatgcgcttcgtaaaaccgcttgatgaacaaatgattcgagacttggctgagcatactcatttattcgtgacagttgaagaacacgcgattatgggtggtgcgggtagtgcagtgaatgagtttatggctcaagaacaaattgttaaacctatcattaatttaggtctaccagactcgttcttgcatcaggcgacacataatcaaatgctacaagattgtggtttagatgctaagggtattttgaactcgattgagcgagcatggcttaaggtaaatcaggtggtttaatacctcaataaaatttttcgaaacattttttcccaaaaagcgtattcatttgctaaaatggatacgcttttatgcattattctttgtcaaaatcttcaaatttgtattgtagtgggtgttcaatggaacctatggtggtgatggctgcgcgtgcggctcaaacagttggtcaagagcttttaaaagcgcatcaaaatcgtcataagctcgatttgcaagttgaagagaaaggcattgatggtcctgtaacacgtgtagatcgttatttagaacaattgacgattgatacattacgtaaaagttataaaaaccatagcttcttaggtgaagagttcggtttgcaagagggcaaaggccacgatgcagactggtgctgggtgatcgaccctcttgatggcacgcaaaactttattaatggtttccctcatttctgtatttctattgctgttcagcacaaaggtgttactcagcacggcgtaatttacgatccagtacgtgacgaattgttctctgcaagtcgtggccgtggtgcagtgatgaaccagcgtcgtattcgcgtaaatgtaaaagacagcctagaaaatacattcttggcagtaggtcacccttaccgtgctaaacgtgctggtgaaattgtgtcttatgcagagcagcactttgcttcattattagctgtgactcaagcgggtgctcaaatccgtcgtggtggttcagctgctttagacttagcttatgttgctgctggtcgttttgatggtttctttgaacttggtttaaaaccatgggatatcgctgctggtgagcttattatcaaggaagctggtggtgttgtggttgacgcacgtggtggtaatgattcacttgaaaatggtcaagtgattgcatgctcactgaaaatgttaaagacattaatgcaaactgtagttcctgcttgggacaaagctgcaaaataatttaaaaaattatttctgagtaagaccctctttttatagagggttttactttttaatggtcggtaaaatacaaataacagtagaaatactgagaaagttgattaaaacacatgacttttaaattctttctgctataatccgcccacgcacttaaatttccgttcattacctgaacattctgttctattcattgtaagcgcacgctgtccatagagaggaccatttcttgcgccccaatcgctcagcgattcttcaggttgcggccgtaatcaagcgtgcgtttagtccacatcgtcgttactcggattgctgctgaataataagattcagctaatatttgctttgccgcttttgccgatgtctatttgtatttattaaaaatggagcaccctttggggtggaactctctatgagcaaaacttttgccgaattttctttgcacgaaaccttacaacaagctcttgaaggtttaggttttactaacccaactcctgtgcaagaacaatctattcctgctgctttagaaggtaaagaccttcttgtttctagccagactggttctggtaaaactgctgcattcttattaccgacattacataatttggcaggtcaagatactttcgttccgttcaaagaacgtatgaaagcagtgactcagcctagcattttagttttatgcccaacacgtgaattggctcaacaagttagccaagacgcaattgcttttgtacgtcacatgaaaggtgttcgtattgctgcaattatgggtggtatgccttttggtaaacaaattcaacagcttaaaggtgctcaagttgtagttgcgactccaggtcgtttattagacttagttaaccgtcgtcaattaaagctagacaaagttgatgctttaatcgtggacgaagctgaccgtatgttagaccttggtttctctgaagacttagaagcgatcagtgacttggctgcgaatcgtggtcaaacgttaatgttctctgcaacttttgctgaccgtattattcgtcttgctgagcgcatgatgaatgaacctgagcgtattgcaattgaaactggtcacagcaccaatactgacatcacccaaactttacactggacagatggtttcgaacacaagaagaaacttctgactcactggttggctgatgaaacgcttgaccaagctgttgtattcgcgagcacacaagaagatacagatatgttggctgaagaacttgcagaagcaggtcactcagttgttgcacttcacggtgcaatgccgcaaacagttcgtaaccgtcgtttacgtagtatccgtgaaggccgtgcgaaaatcttagttgctactgacgttgctgcacgtggtcttgacgttccaacaatttcacacgttattaacttcggcttaccaatgaagcatgaagattatgtacaccgtattggtcgtacaggtcgtgctggtcgtacaggtcaagcgattactttagcgacttatcgtgaacgcggtaaaatccgtgcgcttgaagactacttagaagctcgtttaaatgtttctgaaattgaaggtttagagccatctccacctccagctcgtccacgtcgtgaaggtggtcgtggtggtaacggtggccgtgatggtcgtcgtttcgagggtgaaggtaacttcaaacgtcgtgaaggtggtcgtgatgatcgtccacgtcgtagcttcgatgataagcctcgtggtgagcgtcctgctttcggtggcgaagatcgtccacgtcgcgagttcaactcagatcgtccacgtcgtgaaggtggttttgaagaccgtccacgtcgtagcttcggtggtgaagatcgtccacgtcgcgagttcaactcagaccgtccacgtcgtgaaggtggttttgaagaccgtccaaaacgtagcttcggtggtgaagatcgtccgcgtcgcgagttcaactcagatcgtccacgccgtgaaggtggttttaacgataagcctcgttttgattcaaatgatgacaatcgtggtaaccgcgtagactataaaccacgtcgtgaaaacggtttcggtgaccgtccacaacgtagctttggtggtgaagatcgtccacgtcgtgaaggcggttttggtgatcgtccaaaacgtagctttggtggtgaagaacgtccacgtcgcgcagttcgcgaagaacactttaatcaagaatctcgtggtgagcgccgtcgtaaattcgaccgttaatctttaagagatttaaaaaaaggccagtttacatactggccttttttattttttagttttgttataaaataacaaagtgtgaaacagttcaatgtttattgtaataatgcgtaaaagtaagcgaaaagagtcgcctttggcgtggttgagtaaattcttatttcaacgtggtttgccatatctttttattgcacttgctttgtgcaatggaatctactttgcctatgctttattaactggccatttcgtagaccagtttcaagttctcgatcaataaatttcttttcaaaatctagctcatattcctatattagcttgttttgcttttgtcaaaattacaacaagattcccaaaattcagtgttatagtatgcgggcataaaagtgcaggaatgattgccattatgaataataaaactcctctctcgactcaatcactgattgaagtgaaaaacttgagttttaaccgaggggaacgcgtcatttatgacaatattagtttaaatatacgtcgaggccagatcacggccattatgggaccatctggtacaggtaaaacgactttattacgcttgattggtggacagcttgttcctgatcagggcgaagttttgcttgatggtaaagatattgctcaaatgtcacgtcaggaattatttgcagcacgtgcgcgtatgggaatgctgttccagagtggagctttatttaccgatatgtcggtttatgaaaacgtcgcttttccaattcgtgcgcatactaagctttctgaaaatctcattgcagaactggtcgctttaaaacttgaatcggtgggcttgcgtggaacagaacagcttatgcctactgaattatcaggtggtatgaaccgaagggtcgctttagctcgtgcaattgcgcttgatcccgatttaattatgtatgacgaaccttttgcggggcaagacccgattgtgaaaggtgttttaacacgtctcattcgttcattgcgagaagctttagatctaactacgattattgtttcgcatgatgttcctgaaaccctatctattgctgactacatttatgttgtagcggaagggaagattcaaggggaaggaacgccagaagaattacaagcttatgcttctccatttgtaaaacagttcttaaccggctcggcagaaggtccggttgaataccagtttagccaccaagcttatttagataacgaggttcgtccatgaatacgattgcctggttaggtagactcgttattgagcggattcgagggattggtgttgcggcactgatgctcttacagattattttttcattaccttcagcgggcggttttggacgttttgtctatcaaatgcatcgtgtaggggtaatgtctttacttattatcacggtatcaggcttatttattggtctggtactcggattgcaaggctactcaatattagtcaatgttggtagtgaatcaatgctaggcacaatggtgtctttaactttactgcgtgagcttgcaccggttgttgcagctttgctcttcgctggacgagcaggttctgcattgactgctgaaattggttcgatgaaacaaagtgaacagcttgccagtatggaaatgattggtgttgatcctttaaagcaaatcgtatcaccacgtctttgggctggtatagtcagtttgccaatgttaaccgttatttttgctgcgattggtattgttggcggtaaattggttggagttgactttcttggcgttgatgaaggctccttttggagtggtatgcaaaataatgttcaatttggccacgatgtcgtaaatggcattattaagagcattgtatttgctttgctgtgtacatggattgctgttttccaagggtatgcatgtgagccgacacctgaaggcattgcaacggcaatgacccgcacggttgtatattcttcattatgtgttttaggttttgatttcgtgttgactgcggtcatgttcggagggatttaatgaaatcacgtactagtgagctggccgtaggtatctttgtcattatcttcggtattgctttattctttttagcaatgaaagtgagtggtctagtgggcacgaacttgagcgatggctacaccatgaaagctcagtttgataacgttaatggtttaaagcctcgtgctaaagtgacgatgagcggtgtaacaattggccgcgttgattcaatcacgcttgatccggttacacgtttggctacggttacttttgatcttgatggaaaactgacaagctttaatgctgaacagttaaaagaagttcaaaaaaatgctttagacgaattacgttatagttctgattatacacaagcgactccagcgcaacaaaaaacaatggaacagcaactgatcagtaacatgaactccatcacaagtattgatgaagatgcttatataatggttgcaaccaatggtttattgggtgagaaatatttaaaaatcgtaccgggtggtggtctaaactaccttaaacgtggcgatactatttctaatacccaaggaacgatggatctagaagatcttattagtaaatttattactggtggtggcgcaggtaaggttgccgctggttcatcctcagcagaagaaaaagctcctgcaagtactgacagcagtgcacagccgtcatttgttgagtaagagattatttgaaggagtggttccaggtgaatacgttgtttaaacaaacccttacagcaagtattttgtctactatgattgctggtacagcttttgctgcaccttcagaagcaccacctgactttattaagcgtgttgctgatggcttgatttctcgtttaaaagccgatcatgctaaattgcaaaataacccagcattagtaaaaacaattgtacgccaaaacttagacccgtatgttgattcacaagcgtttactcgtattgtgatgggtacttatgcaacaaaccaatatagtactgctgcacagcgtgctcagtttgaaacgaacttccgtaatacattaattgagaattacggtagtgcatttgctaagtatacaaaccaaacttacacgatgcgtccatacaaggcgacagctggtaaaaaccctgttgtgactttagattttaatcacaatggtgaaaaaattcctgtgtcgttccagttggcagacaaaggttcacaatggaaaatccgtaacatcaatgtttctggtattgatttaggattgcagttccgtaaccagtttgctgcaactgtgaaacgtaatggcggtgatttgaataaagcaattgctacgttccaacctgatgcagatgctgctgttaatcagaataaacaaaaataagtaggtgaagagtggttcagtatcttaaccaagagttagttgtttcaggcaaaattgattttgaaaatgctgaacaacaataccaagctggattggcaattattaaaaagcaaacaagctttcctttaattgttgatttaaagcagcttgagcatggtaatacgttagccttggctgttttagtgcaatggctacgtcaaactccacaaaagtctggattacattttaaaaatgtaccggagaagatgctgaaaatcattcaagcctgccatttgcaagaagacctacatttggtttgatgagcaaagataaaaaagcacctaaatttaggtgcttttttatatacaaaatttgcgggggtaatctctttaaatccattttttccagcggaaataaatgataggtccaataaagaaaccaataataattaataaaacgataataaagctggttgtaccgtgtgcgaaaggaagtacatcagtgttcataccatagatactggcgattaacataggtggtgccaacatacttggtaatatcgagaatcgacggatcgtatcgttttgttcagtgttaataaatcctgacgttgtatcaagcaagaatcgtactttttggaataagaaagcgtcatgttcgacaagcgagcgaacatcttcactaagttctcgaatatctgcatcgtagatatgactgcctaaagcacgtggacgagacaaaaacgttaaaacacggcgcaaatcaattaaacagagctgtgcttttccaagcatgtcttcttgttgtgccaagcgggtaatcatgtcatcaagatctaaaatctgttcacgttgatggttattgagaacctcggttgagtatttttctagatccttgtggatatcttccaagatatccgcaagctcatctagctttgcttcaagtaagcccaataaaatccatgttggatctttataatccatttcgtagtcattacgacgagctcgagcacgaaaagcacgaaaggcaactaacttttcaccacgtaaagtaaataagcgatctttatgtaagatgaatgcaacagtctgcaccatggcaagcatatgggaagaatcttcggcatccccatcaacctgataatttttatttttcgttaaaaaataggtgctgatatgcaaaataccgtcatcatcacggtagaatcgagcagaagatgaaatgtcttctaacgactttagtgtaggtaagttctgattgtaagcatctaagacccattgttgttcttcttgagagggtgcaataagatcaagccatactaattcgggatgtagatcaaatccaccattgatggtggcatcttccagacttccgcgttctgtggcataaaaggcttcaagcatgtgtcttttttccttacgcagtctgatggaaattgatgggtgtattttagacaaggatttgccgaaaaacacttgccaatacgctattttgcaaaaaaaaactctgtcgatagtctagtttgtcagcatgacagttcaataaaacggtttttatactatgaattcaatttgtattttctgtggttcatctcttggttcaaacccaatctttcaacaaattgctcaattaaccggtgaagctattgctaaacaaggtaaaacactcgtttatggcggtggccgttctggtttaatgggtgttgttgctgatagtgctttgcaagccggcgggcaggtcattggggtaattcctcgtgctttagttgatcgcgagttagctcatcctggactgacaaaattatatgtcgtcgaaaatatgcatgagcgtaaaaccaaaatggcagatctgtcggacggttttattgctttaccaggtggggcaggtacattggaagaaatctttgaacaatggacatgggcacaattaggtattcatcaaaagccgtgtgcttttctaaatgtagctggcttttatgaagatttgcttaaaatgattcagggaactgtagataacggatttagccaagcgcggtttgttgataaattgattgcctcagacaaaattgaagatattcttcaacaatttgagcaatatcaggctcctgctccgaaatggacaaatgccgacgttcaaccataaatgaggttaaataggtgaaaacaattacggtcgccgctgcggtgatcttaaatgaacaaaatgaattattgcttgtcagaaagcgtaatacacaagcttttatgcaggtaggcggtaaactggagccgaatgaggctccggaaagtgctatacagcgtgaaatcttggaagaaataggcagcccgtgtgtaatagaacagtttatagggcgttttgagacagcagctgccaatgaaccggatcacaagcttattagccatttatatttggttcgattaaaacaatccccacaaattgcagctgaaattgctgaaatgaagtgggtgaaatttaatgattccgagacaaaactcgcaccattaaccaaagaaattgtaattccgtggtgtgagcagaacttatctataactctataattttaatatgatgtagatgaagcagcagctaggcaactggcatgaatagatgtacaccctagctgttttagcgcctgacttaaagcgtgaattgaacttcctgttgtgattacatcatcaataatcagtacacgacgataacgccgtttttcttgagtgagcgcaacaaattgctgttcaatattttcaaatctttcgagtcgagataatcccttttgagaatgctcatttaagcgttgtacaggctgccaaactggtatttttaattgcttactcaaaagattggcgagtaataaggattgattaaaaccacgttcagttaaacgttgtttagaaataggcatgggtacaatcgcttgtaccttaggaaattttaattgctgtaaaacttcagcaagtaaggtttggtaatgtaatttttgttcatatttaaactgctgaatgatccggttaattggataggcgtagtgacaggccacaagaacagactgatcattgcgctgaatggtttgcttaagccacggtagctgttcccagcattctttacaaagagagtatttttcccgtgttcctatttcgcaaagtaggcaaggggacagcaactgaaaaagatactgtgggtttaaaaacttaaacatatgcgtatcgaggagcttcaggaagccagcgcttcaataaggcatcagcttgctcagggtaatcttttagaacttgttgtgcaacgtagtgtgcttgactcaataaatgatcatctcgctctaaacgtgcgacacggaaacccatatcacctgtttgttttgttcctaataactcacccgggcctcttagctcaagatctttttcagcaataacaaagccatcattactttctcttaaaattgaaagtctttcttgcccattttgtgaaagtggtggtttatagagaagaacgcaaaaactggcttttgcacctcgtcctacacgccctcgtaattggtgtagctgtgaaagccctaatcgttcagcattttcaatgaccataattgacgcattgggtacatctactccaacctcaataacagttgtggcaattagcagttgtagttcattgtttttaaatgcttgcatgacagcctgtttttcatcggctttcattttgccatgaaccaaaccaatattaagttcaggaaagcgctctttcatttcttgataggtggcttcggcggcttgagcatctaaagtttcggactgttcaaccagagtacatacccagtaggcctgtttgccttctcggcagtttgaagcaattcgatgcagtacttcttcacgacgatctagcggaatcgtgacggtctgaattggagttcgacctggcggtaattcatcaataattgatgtatctaaatcgccataagcactcattgccagtgttctaggaattggcgttgcagtcatgaccagttgatgtggggtgagctgttcggcgcctttattacgtaaggctaatcgttgatcgaccccgaatcggtgctgctcatcaataatcacgagtcctagttttgcaaactcaacgttatcttgaaataaggcatgagtacccacaatcagttcagcatggccttctttaatttgttgctcagcgtgtgcccgcgctttccctttttgtttacccgacaaccaagctaccgtaatacctaaaggttcaaaccagcgtttaaaatttaaataatgctgctctgctaaaatttcggtgggtgccattaaagccacttgccaatctgcttctaatgcgtgacatgctgcaaccgctgcaactaaagtttttccagcccctacatcaccttgtaccaaacgcagcataggttgatgttgttttaagtcgtttaaaatttcttttgatacacgtttttgtgcgttggtcatttgaaaaggtaaagcttctagcagcttttttgcaagcactttactactcggaaaagcaggtgaagcaatttgacgaatataagcacgtcgagtgagaagactaatttgatgtgcgaccagctcttcaaaaataagacgttgctgcgcaggatgagagccttgagccaattggatcatattggcatcaactggtggctcatgaatgtaatgtaaagcttctttgagtgcatacccatttgtatattgtttagggagtaactcgggtaaagcatcactatgatgcttcaacgcttgtttaacatattcgcgtaatttagcttgtgttagtccatcggtacttggataaattgctgtgagctgcgtttttggaaggggagtatgttcattaataagttgaatttctggatgataaagctcaagccctcgtgcacctacgcgaacttcaccaaaaatacgtaaacggttaccaggttttattttgtcggttaaatttttataaatatgataaaagcgtaaagtcaccttaccaaattcatcttgtattaatgcggccatagatttacgtttacctggagggaaatcaacagatttgacttcaccctcgagtaaataactacgaccaaccaccaattgattcataggaataatggtactgcgatcttcataatcacggggcagatgaaacagcaaatcatctgtggtaaaaatatttagtttttcgagtagggctgctgaagccgatccaacgccttgtaactgatggactgaagtcatgtcccctcaacgagttctctatgcatatattatttatcggttatggtaaaacatctcagcgtgttgctaaacaactatttgagaaaggacatcaaattaccacaattagccgtagtgaaaagacagacccttatgggacacatctcgtacaggatatttttacgctcgatttaagcgaaattgcacctgtagatgtagtgtatattttactttcaccagacgatagtactgttgaaggttatcagcatacttatgtggatagtattgagcctattcgtcaggctttaaaatcgcatccggttaaaagattaattgtggtgtcatctacgcgggtatatggtgaaaattctggtgaaacaattgatgatcatagtgagattcacccaaacgatgcccaagggcatatcttgcacaatatggaattgctatggcaaaagtattttccgtcacagtgcgtgattgtacgtcctacagggatttatggggcttctattgatcgcctaaaacgaatggctgagcacacgcaaacctatccaaatattcactatagtaaccgtattcatattgatgatttagcaaggtttttggcatttttagctgattttgaaaaaccccataaaagttatcttgttgctaataatgcacctgtacctttgcatgaagtcttactgtggtttcaaagtcagttagatttaccgctacttaccttagattcagctcatgtgtcaggcaaaaaaatttatgcgaaacatttgtttgagacgggttttcaacttgagcatccaatttgctttaatgactatttattatgtttaaatgctcatggtacaaattaaaatttagactaaactttaaataacaacagaaatacctgatgaggcagttaaattgccgataaagataaaaaggttaaaagtgaaaaaattttgtttagctctctttttgagtgtaacgtcagttacgagttgggctggggatcaggtgtggtgtgcatatgatccagcgggtacccaaggggatattacgcgtcgactaaatgacattcgtttatatgctcagcaatatcaggttaaattcaaagtcgttagttatcaaaaagagcagcaagccattcaagcctttgatgagggtaaatgctcaggcttagcagccagtaactttaatacttatcagtataatcattttatgggtagtacctcaggtattggtcttatacccaataaccggactgcacgaaatctattgcagcttttaaatcatcctacaattgagaaaagattaattaataaagactatgaagcagttggtatgattccggttggaactgcaaatatggtcatgaaaaccaaaaaaatatcaaaagtggcacagcttagaggtcaaagaattggagttctggccaataacccgccacaacaagctttggtgagaagtgtaggtgcgcagccagtatatgttgatttatcgaatgcgattgcgcagtttcgacaaaataaaatcgatattatgccagcgcctgtttatggtcttttgccttataacctacagaaagattttgggccagatactcaggtgattaattttcctttggcgtatttcggggtaaatataattattaaaccacaagcttatccagccaattttggacggaaaattcgggcttggtttgtccaaaatagtcaattattaacgaatcgagctatacaatgggaaaaccatttaccagcctattattgggttgacgtttctttttacgaaaagcagagctatgacattatggtggcaaaaatacgcaatcaatatgttcgctccggttattacgatgcctactttgtggagctaatgaaacgcttacgttgtattgatgatccgcgttactttgaatgtccaatgagtagataaaataaaaggcaacttaagttgccttttattttgcatgaagactttaagcttttttacgttttaaacggcgtttggcttgctgagaagccattgcttcaagagcttcttttaactcttcatcagtaaaggttgtgatgtgttgcaacatttgtaatgttacttcatcaagcaccaactgtgcgcctgctgccatctgacggaaattatcatcaaactcaatttggccttggtcattcgttcgaatgtagttttgttgagttaaaactttgataaagctttggaacaatgctttgtcaaagaattcaggagagttaaattcataaagaactgataaacgttggcctaataaatgacttaattcttcaacttgttttgctgaaatattgcctgaaccacgctgagtgattaaagctaaagtcatgtaataacgttcaaggctttgtttaacaggtgttgctaatacaacaagctgattatgctcttcagtatttggtgcagagctaattaaattgccttcgtcatcttgttgaataagatttgattgaaccaatgcatctgcatattgctcaatctgttctttaagttcgctacttttccatttaaggaatagttcggcttttaagaatggataaagtgtatagataacattgcttaaatcagcacggctaattttcccgttatgttcaacaagagatgcaatcaatgaaggtaaaacgaatgcatgcaaaatgttattgcggaaataggtgaggagaaccgcttggttatcttcaatcgcaataatgtcaccaagggcatgctgtacgcgcttaatcaatttaagctttaagccataagcaataatttccttaccagatagcggcgtcacttctgtgcgctgatcgtaagggaaatttgatgctaaattgcggtaagcttcaagctgcttaatacagatttcttcatcaagtgtatgctttggtgttgcaagcaagataattgaaagtaaagaaaccggattaatcactaccgcacggttaatattttctaaaatcgcatttgcagaactgtttactgcctctgaaacagcaggtggcactgggtcatcgttcttttcaatataaacgttctcagcattatgctgtttaagcaagtcatctagaaaaacaggttcaccaaagttaacgtgtactttaccgaaaatacgttcaatttttcggagtgtttttaaaataccaaaaatagactcggcttcttttggcttaccttgcatttcgcctacataggttgaaccttccataagacgctcataaccaatgtaagttggcacaaatacaatcggcttggcacggccacgtaaatgactatggactgtcattgcgagcatgccggttttcggtggtaataagcggcctgtgcgcgaacgtccaccttcaataaagtattcaagtggtgtgttgcgagaaagaatactatataaatattctttaaatacagaagtatagagaccattaccacggaaagagcggcgaataaagaaggcaccgccaccacgtaaaagctgaccaacgaaaggtaagtttaggttgtcgcccgcagcaatatacggaaccatcaagccacgtttataaatcacataagacagtagtaagtagtcaatgtggctacggtgacatggtgtgtaaacaatttcatagtcttttgcaagctctcggacagtactgaagttatgaacttctacgccgtcataaagctgagtccatagacgtgttaacgccaaatctgcaaaacgtactgctgagtgagaataatcagatacgatttcattcacataaccaatcgcacgacgctctgcttcaagcatgctgattttaccgcgaatactttcgcgtcgaatggcttcttgaacatcacgagactttaataccgactgcatgacattgcggcggtcagataagtcagggcctaaaacaacttcgcgttggcgatcaaggtagtcatttaaagtgctaacaatataagttgctggtgaaaggtttggataatgcttctgagcatattcaacgaggtcacgtaaagactgtggttcatggaattccaaataagattggcgaccatgcaaaccaatattcacaagctgtttaactgtacttggtgttgcccatgtatctgagaataacaacttaaaccaagagtcttctttatctggagaacgaccccataaaacggttaccggaaccagttctatgtcgagttcaggatttgcttgtaaaacttcgattagtttaattaaacgtggcggaaaagcatgaggagggggattcagtaggttattttcatcattgtgttgtaaaaataaaactgaagctttttcctgatgagtaccgatgactaatggatctagcgctggctttaaatttaagcggcgagtttccccatccaccactaaagcattactgcgagaatgattttgcaagacatagcacactactttttggcgctcggtcttcgcttctgtttctgttgttgatactggttcagtaggaacttccccaagaacatgtggtgttaccacgaggtcaagtagtttactcgaaagccgacgatacatttgaccaaacccactcttggacataagaactcctacttcttaaagacaaatcccggcaccaaaggcagagggtaaatattttgcggtatttattaaaaaaacaatatgctattttctgataaattataattcttttggcattttttatcgttaaaaatcgtatttttagctgttttaaaggcaatgtttgtcagaagttgactgattgttccatgtacaaatagttttttatggcacaatagattctacacatctgtcctttaataccaattttgcctgcaatatgaaggtatctctcatgaatgcgttaacccaagaactggttgagctgctcactttagaaaagcttgaagaaaatatttaccgtggaattagccgtaatttggtcggtaaacgtgtttttggaggtcaggttctcggtcaagcattacgtgctgcttcttacacaactgatcgtcctgcgcattctctgcatgcctactttttatatggtggtgatattaatgctccaatcatctatgaagtagaccgtttgcgtgatggcaaaagctttgtcagccgtcaagttcgggcaattcagcatggacgagttattttctcggcaatggtgtcttttgctaaccctgaagaaggcttgaactatcagcatccagaaccagattacccagctcctgaagcgctaaaatcggaaagtgagctgaaagaaggtatcctgaattttgtaccggaaaatgttcgtgcaagttttatgcgtgagcgtcatgttgaaatccgtccgattgatccagtcaatccatttcaaccacaaccggaagcgccttttaatgcgcactatatccgtacccatgaccgtattccaaaacagctagatgatatttcattgcatcaagcaattgtagcgttttactcagactttactttgatgacaacagctttaagaccacatggcttaagttatatttctccaagtttgcaatgtgccagtattgatcatgcgatttatttccatcgcccacttcgtgctgatgaatggatgctctatgacatggaagctacagttagtgcggcttctcgtggtttaaactttggccgtatgtggcaaaatggccaactcgtatgtagtacggtgcaagagggtttgatgcgtttacgggaaattgaaactcaataaataacgatgagccatctgaaaagatggcttttttatttttaattgaaacgatgtgacaaaaaattgctcgaatgaaaagcaagctcatgtcatatttacaaaaggattgcctactgaaaaaaataatgttgatatgaacttaaatacacaaattctgattgctgccattttaggtttagcctttggcttcctacttaccatgtatccggacactgcttttgtaaagcacagtttatatggattaggcatattaagtagtgtttttattgggctacttaaaatgttgttggtgccattaatttttagctccattgtggttggagtttcaaatttgcaggcaggtggacaattaggcccagtttggaaaatcacattcttgtgttgtatcaccaccaccaccttggccttaattttaggtattagctgtgctcatttgtttgaggtcgggcgaggtgtagatatttcaatttttcaggcatctatgcaaagctatcaaacaccagatagtttaaacccggcaactttcttcactaattttattcaaaatactttaattaacccatttaaagcttttagtgacggaaatgttttagctgtcgtcgtgtttgctctatttgtgggtgttgctttagttcatggtggcgaacgttttaaaagtattcgggtattgagtcatcagttttttgaaatgatgatgatgctagtaggctgggtaatgaaattggcgccgttaggtatttttgccttactcgctaaattaatggctaccgaagacatttcagtattaagccgattggcggagtttgctgctgtggtaacaggtactactatttttcatggcgctgttgttttaccgctactgctttggatttttggtcgtatgagcccttggactttcttcaaaggcacacgtacagctttaattaccgcatttgcaacgagctctagctctgccactatgccgctgagtatgaaatgcgcacaggaaaacttaggtgttcgtcctcaaactgcaggttttgtgattccattgggtacacagctcaacatggatggtacagctttatatgaagctgctgccgcgctctttgtggcaaatctagttggactagacttaaacctgacacaacaaattgtagtgtgcctaaccgcaatgatcgcatcacttggagcaccaggaattccaagtgcgggtatggttaccatgattatggtattacagtctgtgggtttacctgccgaagcaattgcgattttacttccaatcgatcgtttactcgatacggtaagaacggttgtaaatgtgcagggagatatgatgattagtgtggtagtagatcgatataccaaagataaagatatcagtatctaatctctaaataaaaaagcaggatttatatcctgcttttttattttaagctgcttgtaattcagctcttttggctgctggcgactgcgataaataacttaccgcatcttcagtgctaccttctttaactggatcataccacggcatgagatagtcaatttgctgagcaataagccagattgggtttggtaaaacctgattatcttttcggctaattttataccattctagagcaacccaagctgggaaaaatcttgatttggcagcatcagcaaaacgtggatcttgcttcataatatgtgcagcgccgtctacccatagtcctaacacaagcacaattactgcaagacttaaataatagcgcggcatataaccgcctcctaaatggcgatataaatcgaaagcaaccgtgcggtgttcaatttcttctgaaccatgccattttaccaagtctaccatttctggatctgcgcctaactcttcccagcgtttgttataaagcgcatatttacctaggacacatgtcatgtgctcaactgtcgcgataacacctaaacggaataaatcccattgctcttgcaagaattgcggaacttctttgtcaaaaggcttatctgccaaagcagtagtaaatagataattcataatgtccagatttctctggatatcaatattgcgtgcacttaaatattctttattggcagaagtgtgtgcgtttgcatgcattgcttcttggcgaataaatgcttgtacatcctgtttaagtttttcatcagtaatacgaggtaaaaccttgttatagagccggcaaaaccagaactctccagcaggcaagatattgttaatttcattaataaaataacttgcaaacggttggtttggaatccagtctacaggggtatctttccagtcaaattttaccttgcgtggaagaattttataatcaatagaagaacctaaagccttattcttcaaaaaagatagcaatttcatcatttagtcctgatttttaactcgatgaagttatgatgagtataaaaaaagcccctacatttgtgtttagcaataggggccaattgaatataaatttaatgaagaaattgtatctgttttgacgatttactcttctgcatcctcatcgctcgcttctgggattgtatcaacgtcaaattctggctgttgttcaagcgtaaagtgcagacgtccagccatcacacttgctagctcttctaaacctagtttgtttaatgaagaaaaaagctgaatcgagaaatcaagcttcatttttttcagttgttgtttaacttcaagcaatactttgttcgctggaccgcggttcagtttgtctgctttggttaaaagaatatgaacaaataaatggcgtgaataagcccactctagcatcatcatgtcaaagtgctgtaaagggtggcgaatatccatgagtaaaaccaaaccttgtaagcttttacgatggattagatagttttctaattctttttgccatacacgtttcatatcttccggtacggctgcataaccataaccaggaaggtcaactaagcgttgatctgggttacctaggctgaaaaagttaatcatttgcgtgcgcccaggttttttggaggcacgtgcaagctgtttctggtttgttaatgcattaattgcgctagattttcctgcatttgaacgtccggcaaacgcaatctcgtagccactatcttcaacacatagtgccaatttcggagcactcattaaaaattcagcttggcgtaaccagtttagagattgcacagcataggctgtaatcgctggatccggtttcttttcataactgatcttttgcttgggtgcgagtctggctttggtgtctttcgatttttcactacgacgcataaaaaataactttttaaatgagagggctcgcgcctagtataaaggagcttggttattcttgctaattttcagtaagcttgcttaaaaagataaatagaattacgggctctagagttgtaaaaaggcgataggggagtgatctgaagcagattttggctgttgtaaaacttcacccaacgtatattgatctaaactttgataaaagctttccaaagcttgatcaagaatacctttcaaaccgcaatgggagcgtaaaacacaaggtggtgtattgcattcaacaatttggtggtcaccttgtaaaattcggacaattgttccaagttttaaatctaaagcttttggatttaatcgaattccaccacctttgccgcgaatggtaataatccactcttgtttacccataaaatggacaaccttcacaagatgattttgcgaaacatataaatcttgagcgatttctgcaatcgtgtacggcgcatcacttggacgagcgacatacattaatattcgcaaagcataatcggtaaatttattaagttgcatgatcaccaaaaactaaaggttaggaggttgatcatcttagcctgaaagtctaaagaataaaactttcaggctagagctttttaagttacagcgttaaaggagctgaaacttgtacttgatcaccaactctatagtgctcaagcaaaatgtttgaaacagagaactctgtatggtcttcttctggttgaacatcaaaatgataagtattgtcctcttgagcctctgtgaacttaaatgcttttggttgttcaagctgttggttaggtacttgaacttttacagaaataaaagcatttgctgggctggtgagtacatcttcatgatcagttgcctttaaagtaaagcgtttgccagactcaagtgggtcaatttgcgtaatttcaaatgaacgccagccagcccatccacctttcaagctttcaagttgttcatatttttgtttttcaacaccaattaagatatctgccaactgtaagtaagcttgtttccacgcttcaatgagttctgattcaaatggaacatttaaaacttcactaattgaatgaagcaagttgtcgcccacaattgcatattgatctggctgaatatctaaactgacatgcttagtggtaatgcgttcaaccgctttggcaagcaccgtaggattctcaatattttcagcatacgcgagtacagctgctgcaagagcacgaggttggcgcaggctggtctgatcatcaagattaaaaacattttttaattctgggttgttattcaacatacgcttatagaagtatgtagttagagtaacaccatgttcacgcaatacaggtacagtagatttaacgagttcaatttgttgtggagtcatggctagaccttaattatctggctatataagatgtatttaaaatacatctttaaaatagttgtagcaatagctttttaataaaaaccttaaaaaatttaagggatataaaatcccttaaattaatatactgatttaaaaataaattttattttccaaataatgagccgagtagtccccgtactaatttttggccagtactaccacctaagctgcgagcggcactttttgcaaaagttccgacaatatcttgagtaagtttagctctttcacgcgccgcacgttcctcttctttttgctgttcacgtgctagacgctcttgttctttggcttgttgtttcgctaaggtttcctgttctttcgcttgctgttttgcgagttctgcatcttgtttttgctgttcccgttcagccactttgttttggagcatttcataggcactatcacgatctacagcttgttcataaaccccggcaataatactttgcgaaattaaggtctgacgctcttctggagtgataggcgtaaatgaagagtaaggaggcataacccaaccacgttctacaatttgaggtgtaccttgttcatctagacaactaatcagtgcttcacctacaccgagctcggtaattgcttcatctactttaaaatcgggattagagcggaatgtgtctgctgctgtttttactgctttttgatctttaggagtaaaggcacgtaaagcgtgttgtacacggttgccgagttgccctaaaacactttctggtaagtcgagcgggttttgggtaataaaataaattcccacacctttagaacgaattaaacgtacaacttgttcaattttttcttgtaaagcttgactggcgttgtcgaataacaggtgagcttcatcaaagaaaaacacgagtttaggtttatccatatcaccaacttctggaagctgttcaaataattctgaaagcatccataacaggaaagtagcatatagcttaggtgtattcatgagcttgtcagccgcaagaatattgatataaccatgcccatttgcgtcggtttgtataaagtccagaatatttaaagctggctctccaaaaaactgctctccaccttggtcggcaagagcaagaagattgcgttgaatagcgcctaagctggctggagataagttgccatattcggctttaaactcagctgcatgttcacttacaaaagtgatcatggcttttaaatctttaaagtcgaccagaagtaacccttggtcgtctgcgatacggaatacggcagataaaacaccttcttgggtgtcatttaagttgagtatacgtgctaataaaattggcccaatttcagaaatagtggttcgaatagggtggccttgctggccaaataaatcccagaaaacaactggattggctgcaaatggaacactgtcgatctgtaaaagctttaagcgttcattaaatttatccgaagcttcaccagcttttgcgagactcgaaacatcaccttttgcgtcggcaagaaagacgggaacgccgattcgagaaaaactctctgcgagcacctttagggtgactgttttacctgtaccggtcgcacctgcaatcaggccgtgccggttggcaaattgggaaagtaaaacaatttcttttgatgtgtcgttaatattttttgcaataacaatcggtgtacccatatatttttatcccttagtgtgagccactattgatgttgtcgttttacatttgtttcaaagcattttcgatatcttgaattaaatcttgtggatcttctagccctatacagaagcgaaccaacaaaccttgttgtaaatgtgtattttcaagttttctcatcatttttaaatcataaagcatgacgagactcacaggtcctccccaactaaaaccaattttgaatagcttaagagcatcacaaaaacggcgtactgctgaaatatcataatcagatttgaatacaacactcactaagcctgcacttttacctgttgagcaaatttcttgccagtattgatgaccaggtgcagctttatcacttggatgtagaacttgtgcaaactgaggttgctcttttaaccatgtcagtagggttttagcattatttgattgttgctcataccttaatgacatatgcgcaagactgcgttgaatttgggcggtatcatcaccagataccgaaatccctaaaatggcatgcattcggaacaaacggtgatgtaacttctcatcacgagttaccacacttcccattaaaatatcgccaccaccacttggatatttggtaagcgcatgaatggttaaatccactgataaatgctcatcggaaaaatcaaaagcattaaaggcgaggccagctccccaagtattatctagtgcagttaaaacgccatgtgcttttgctttttttactagcgctttgagatctggaaattcaagagtgacagaacctgctgcttctaaccatagcaacttggttttatcagaaggctggaaacttgagacatcgatcgggttataaacttgaacattaattccatattgatcttttaagtagtttaggtgttccagattcggaccatatatgttgtctggcacccaaacttcatcacctgttgctagcacagcagaatttacgagattaatcgcagataacccgcttggagcaagtaggcagtataaaccaccctcaacttgagcaatattatcgcctagtgtgaatgtcgtaggcgtaccgtgggtgccataactatagtcataaggatcggtccaatgacggtcaaaaaggtgcgaagttgatttaaaaataatagttgatgcacgaaataagggaggttgcacggtttcaataaattgaggtgcttttcgtggtgcatgaatgagttgggtttggaaattgttatgctttttcatggggcgctatactttacataatgagattagattaagagaaaacttacttaactgctagatttttgattatttctaagatgtttcgttactagtgtaacattcattaaaacttggctttatttttgcaaagatcaaaccaacattctaacaacaataggtttaagcgcatgaagtcgcatttacgtgttcactattttcaacatattgctggcgaaggttttggaagctgctattcattcttaaaagcacaccatgcaacgataacagctacagagttttttgcacttccagttgatctccctttggaaatagaagcattgccacatattgaagatgtggatttgctacttattatggggggaactatgagtgtaaatgatgaggcaaattatccatggttaaaaatagaaaaaagatggatacgtcgttatttggcggcgggaaagcctgcgataggactttgtctcggaggccaacttattgccaatgcactaggagccgccgttagtagaaaccgttatcaagaattgggatggtcgaccgtacaaagggtgccgaatttacctaaagaaagctttttattaccagaaaaaataaatgtaatgcagtggcatagtgaaacttttgagattcctaaaggtgcgattcatttagcagagaactcagtttgtcgtaaccagatgtaccaaattggttcaaatgttcttggttttcaatttcatccagaaatgacaccgaaggtattaaatcttcttttagagaacgaacaagagctttctatttttaaaggtgagtatgttcaatctttagatgaactacatcattgcgacatccaaaagtttgaacaaggcaatcaacttttaaacagggcaatagagttcgtggtcaatcaataaaaatatagagttgatgagaaaaaggatgaattgagcagaaaatagaaaaagagaattgcataagacttaaacaatcgttataataagcgaccctcaagaagagggcatttactgcgaagaaagtagtaaatgtgcattacagtcgtggcatcgatcacgaccttggtgattatcactgcctttgacacttaccagataggtgagatgcgtcaaaggtgattctttatatatttggcttggagtttactggtatgtctaaccagagaattcgtatccgtcttaagtcttttgatcatcgtctgattgatcaatctgctcaagagatcgtagaaaccgctaagcgtaccggcgcacaagtgtgtggtccaattccgatgcctactcgcatcgaacgcttcaacgttcttacttcaccgcacgttaacaaagatgcgcgtgaccagtacgaaatccgcacctacaaacgtttgatcgacatcgttcaacctacagataaaactgttgatgcattgatgaagttagatcttgcagctggtgttgatgttcagatcgctttgggttaaggctttcggttaattaacgattagttaattaggccgcttttttagaggtttatgcacatggctattggtttagtcggtcgcaaatgtggtatgactcgcatctttacagatgctggtgtttctgtacctgttacagtcatcgaagtcgatccaaaccgcattacgcaaatcaaaacacttgaaactgatggttatcaagctgttcaagtaactactggtgaacgtcgcgagtctcgcgtaactaacgctcaaaaaggtcacttcgctaaagcgggtgttgctgctggtcgtttagttaaagagtttcgtgttactgaagctgagcttgaaggccgtgaagttggcggtactattggcgttgatttgttcacagttggtcaaattgttgacgtaactggtcaatcaaaaggtaaaggtttccaaggtggtgttaaacgttggaatttccgtacccaagatgctactcacggtaactctgtttctcaccgtgttttaggttctacaggtcaaaaccaaactcctggacgcgtgttcaaaggcaaaaaaatggctggtcacttaggtgatgaacgcgtaacagtacaaggtcttgaaatcgtatctgttgacactgaacgttcagttttggttgttaagggtgcaattcctggtgcaactggcggtgacgttatcgtacgtcctaccatcaaggcctgaggggaaataccgtgaatttaaaaactgtttccggctctgctgttgaattgtctgaagtagctttcggacgtgaatttaacgaagctcttgtacaccaagttgttactgcttacttagcaggtggtcgtcaaggtactcgtgctcacaaatcacgtgcagacgtttctggcggtggtaaaaaaccattccgtcaaaaaggtactggtcgcgctcgtgcgggttctattcgtagcccaatctgggttggtggtggtaaaacttttgctgctcgtccacaagattggtctcaaaaagtaaaccgtaaaatgtatcgcggtgcaatgcaatgtatcttagctgaacttgttcgccaagatcgccttgttttagttgaagagttcgctgttgctgctccaaaaactaaagaattgcttgcaaaacttaacgatttaaatgcagctcgtgctttgatcgttacagatgctgtagatgagaacttatatcttgcagcgcgcaaccttccacacgttgatgtggtagatgcaactgcaatcgatcctgtaagcttgatcgcgtttgataaagttgtgatgtctgtagctgctgctaagaaaattgaggtagaactcggatgaacaacgaacgtatctatcaagtcctaaaaggaccagtcttctcagaaaaggcacaagttttaggtgatactgctggtgttcaagtatttaaagtagatatcaacgctactaaacttgaaatcaaaaaagcagttgaaaaactttttggtgtagaagttgttaaagttaacacaactattactaaaggtaagactaagcgctttggtcgtacattaggacgtcgttctgatgttaaaaaagcatacgtcaccctgaaagccggccaagatgttgaaatggctgacttgggcgataccgctgaaagcgcagcggaataaggacgaaaattatgccgattcaaaaatgtaagccaacgtctccaggacgtcgctttgtagagaaagtggttcatgaccatcttcacaaaggcgcgccttatgcaccgttggtagaagcaaaaaaacgtactggtggtcgtaataacaacggtcacattactactcgtcacgttggtggtggtcataagcaacattaccgtatcgttgactttaaacgtaacaaagatggcgtacctgctgttgtagaacgtattgaatacgatccaaaccgtacagcgcatattgcattattgaaatatgctgacggtgagcgtcgttatatcattgcgcctaaaggcttacgtgctggtgataaagtacaatctggtaacgatgctccaattcgtccaggtaactgtttaccacttcgtaacatgccaatcggttctacacttcataacgttgaacttaaaatcggtaaaggtgctcaattagcacgttctgctggtgcttcagttcaattgttgggtcgtgatggttcttacgcaatcattcgtcttcgttcaggcgaaatgcgtaaagtacacgttgaatgccgcgctgtaattggtgaagtttctaaccaagaaaacaaccttcgctcattaggtaaagctggtgctgcacgctggcgtggtgttcgtcctaccgtacgtggtatggcgatgaacccgattgatcacccacacggtggtggtgaagggcgtaacaaaggtattcaacctgtaagcccatggggtcaaaaagctaaagggtacaagacacgtaccaacaagcgtacgactaagatgattattcgcgaccgtcgcgtcaagtaaaggaatctgactaatgcctcgttctctgaaaaaaggcccattcgtcgatgcgcacttgttcgctaaggttgaagcggctgttgctagtaactctcgcaagccgatcaaaacttggtctcgtcgttcgatgatccttccagactttgttggtttaacaatttctgttcacaatggccgtaaccacgttccagtaattgttactgagcatatggttggtcataaactcggtgaattcgcgccaactcgtacctatcgtggtcacggtgttgacaagaagtctaaacgttaataggtgtcatgatggaagtaactgctaaattacgcggtgccgctatctcggcacaaaaagcacgtttggttgcggacttaatccgtggcaagtctgttgcacatgctttaaacatcttgaacttcagcaacaaaaaagctgcagttttagttaaaaaagcattggaatctgcaattgcaaacgctgaacacaataacagtttagatgttgacgaccttaaagtttctacgatttacgttgacgaaggcatgagccttaaacgtattatgccacgtgctaaaggccgtgcagatcgtattactaagcgtacttgtcacatcaccgttaaggtaggggtttgatatgggtcagaaggttcatccaatcggtatccgcctaggtgttgtgaaacgtcataacgctaactggtatgcgaatccgaaacaatacgctgaatacttgcttaaagatcttcaagttcgtgagtttttaactaaaaaacttaagaatgcgatggttagcaatattcttatcgaacgtccatcaggtgctgctaaagtaacaattagcacagctcgtcctggtatcgtaatcggtaaaaaaggcgaagacattgaaaaattacagcgcgaacttaccaacatcatgggtgttccagcgcaagtaagcatcaacgaaattgatcgcccagacttggacgcgcgtttagttgctgaagcaatcgcttctcaattagaaaaacgtgtaatgttccgtcgtgctatgaagcgtgcggttcaaaacactatgcgtgctggtgctaaaggtatcaaagttgaagtttctggccgtttaggtggtgcagagatcgctcgtacagaatggtatcgtgaaggtcgtgtacctttgcacactcttcgtgcggacatcgactatgcaactatgcgtgctgaaactacttacggtacgattggtgttaaagtttggattttccgtggtgagattttaggtggcatgaaacaagtcatgaaccctgctcctgctgaagaacgtccagctaaacgcggtcgtggtcgtggtgaaggtcaagagcgtcgtggtcgtcgcggtgaccgtgctgctgacaagggagaataatccatgttgcaacctaaacgtaccaaattccgtaaagtgcacaaaggccgtaacactggtctagcacatcgtggtagtacagtatcatttggttcgattgcaattaaagcaactgagcgtggtcgtatgactgcacgtcagattgaagctgcacgtcgtaccattagccgtcgtattaaacgtggtggtaaaatcttcattcgcgtattcccggacaaaccaattaccgaaaaaccattagaagttcgtatgggtaacggtaaaggtaacgtggaatattgggtttgtgagatcaaaccaggtaagatcctgtacgaaattgaaggtgtgaacgaagacttggcacgtgaagcttttgctttagctgctgctaaacttccgtttaaaaccactatcgtgactcggacggtaatgtaatgaaaactaaagatctacgtgaaaaatcggtagaagagttgaaagctttgcttgatgagcaacagcttaaccaattccgtcttcgtatggcgaaagcaactggtcagttgggtaaatcgcacgaagtgcaagttgctcgtaagacaattgctcgtattaagacactccttaccgaaaaacaggggaacggacaatgagtgaaaaaacagtccgcacgttaaccggcaaagtagtaagcgacaaaatggacaaatctattgttgtccttatcgaacgccgcgttcaacacccgttgtatggcaaatcaattcgccgttcaactaagttacacgctcatgatgagaacaacgttgctaaaattggcgatgttgtaaccattaaagaaagccgcccaatttctaaaactaaagcttggactttagtggaagtagttgaagcagctgctgagtaattcgacgttcttgttgcatcatcggtcaatttcgagtactctttgagcctttcgaaattgtgaccggtgatgctcggttttggagtagggcaatgattcaaaccgaaactatgctcgacgtagcagacaacagtggtgctcgccgcgtacaatgtattaaagtacttggtggttcacatcgtcgttatgcttctgttggcgacattattaaagttactgtaaaagaagctattccacgcgcacgtgttaaaaaaggtgacgtgatgaatgcagttgtagttcgtactaagttcggcattcgtcgtccagatggttctgtgatccgttttgatgataacgctgcagttattttgaacaacaacaaagctccgattgcgactcgtatcttcggaccagtgactcgtgaacttcgtactgaacagttcatgaaaatcatttcattggctcctgaagttctataagaggcaatcatggctaagattaaaaaaggcgatcaggttatcgtgatcgcaggtaaagaaaaaggcaaacagggtactgttttgtctgtttctgaagaccgcgttaaggttgaaggccttaacttagtgaagaagcatcaaaagccgaatcgtgtaactggcgctgaaggcggtatcgttactcaagaagcttcgcttcatatctcaaacgtggcaattttaaatgctacaacccagaaggctgaccgtgttggttaccaagtgattgatggcgtgaaaactcgcgtttacaaatcaactggtgaatcagtggcggtagcgaagtaataggttgaaaaggcaatggccagacttaaagcacgttacaacgacgaacttaaagcgaagttacaagaagaacttagcattaagaatgtgatggaaattcctcgcatcacaaaaatcactcttaacatgggtgtaggcgcagcagctactgataagaaattattagacggcgctgtagctgacatgcaattaattgctggtcaaaaaccagtagttactcttgcacgtaaatctatcgctggtttcaaaatccgtgatggttggccaattggttgtaaagttactttacgtggcgaccaaatgtacgaattcttggaccgtttgatctctatcgcaatccctcgtatccgtgacttccgtggtttctcagcgaaatctttcgacggtcgtggtaactactcaatgggtttgaaagagcaaatcgttttccctgaaatcgatttcgacaagattgatcgtattcgtggtatggatattactattactacgactgctcgcaccgatgacgaaggccgtgcgcttatgcgtgcattcggcttcccgttcaaataagaggtcgatatggctaagaaaggtatgattaatcgcgaattgaaacgcgaaaaaactgttgctaaatacgctgcaaaacgtgctgaattaaaagctactattgcaaatgtaaatgcgagcgacgaagaacgtttcgaagcgatgttaaagttacaagcattgccacgtaatgcatctccggtacgtcttcgtaaccgttgtggtttaactggtcgtcctcatggttacttccgtaagttcggtttaagccgtaacaaattacgtgacacagtaatgcaaggtgatgtaccaggcgttgttaaggcaagctggtaaggagcgactaaatgagtatgcaagataccgttgccgacatgctaacacgtgttcgtaacgcacaaatggctaagaaacaaactgtttctatgccgtcttctaagttgaaagttgctattgcaaacgtacttcaacaagaaggttatatttcaaacgtagaagttgctcaagaagagacaaaatctactttgactattactttaaaatatttcgaaggcaagccagttatcgaaatggttaagcgcgtaagccgtccaggccttcgccaataccgtggtaaagataaacttccaagcgttaagcaaggtttaggtattgcaattgtttctacaagcaaaggcatcatgactgatcgcgctgcacgtgctgcgggcatcggtggtgaagttattgcttttgtttcttaataggtgattcctcatgtctcgtgtggctaaagccccagtaactgtaccaaatggtgtaacagttactcagaacggccggcaggtcgaagtgaaaggcagcaaaggtacattgtctttcaacctgcatgcgctggtcgagctaaaacaggaagaaggtaaacttcaacttgctccagctaaagaatcgaaagatgcttggatgcaagctggtactgctcgcgctgtattgaacaaccttgttaaaggtgttagcgaaggcttcgaacgtaagttgcagctagttggtgttggttataaagctgcggttaaaggtacagttgtaaaccttaaccttggttactcacacccaattgactacgctttacctgaaggtgtaacagcggaaactccaactgctactgaaatcattttgaaatcagcaaacaagcagttgttaggtcaagtagcggcagaaatccgtgcataccgttctcctgaaccatataaaggtaaaggtgttcgttattcggatgaagtcattcttcgtaaagaagctaagaagaaataaggcgcgaggttcttatgaacgaaaagaaacaatcccgtttgcgtcgtgcgaaaagcacacgcttgcacatccgtgcattgggtgcgactcgtttgtgtgtaaaccgcactccgcgtcacatctatgctcaagttatttcagcagatggtggcaaagttttagcgcaagcttcaactttagatgcatctttacgtagtggtactactggtaatattgaagctgcgacgaaagttggtgctttaatcgcagaacgtgctaaagcagctggcgttactaaagttgcatttgaccgttctggttttaaatatcatggtcgtatcaaagccttggctgatgctgctcgtgaaggcggcttggagttctaatcatggcaaaagttgaacaaaacgaaggtctcgttgaaaagctggttgccgttgatcgtgtagccaaggttgttaagggtggtcgtatcttctctttcacagcattaactgttgtgggcgatggtaatggtcgcgtaggttttggtcgtggtaaagctcgtgaagttccagctgctatttctaaagcacttgaagctgcacgtcgtaacatgatcactgtagaccttgctggtactactttacaacaccctgtgaatgctcgtcatggtgcaagccgtgtatacatgcaacctgcttcagaaggtactggcgtaatcgctggtggtgcaatgcgtgccgttcttgaagctgcaggtgtacataacgtacttgctaaatgttatggttctactaacgctgctaacgtagtaaacgcaacttttaaaggtttgcgtgatatgacttctcctgagaaagtcgctgcgaaacgtggtaaatcagtagaagaaattcaagggtaatcaatcatgaaaacgattaaagttacccagactaaatcttcttcacatcgcttgaaaaatcacaagctttgcttacaaggtttaggtctgcgtcgtattggtcatactgtagaagtgcaagatacgccttctaaccgtggtatgatcaacaaagtctactatatggttagtgtagaggaataagccatgactctgcgtttaaatgagcttgcacctgccgaaggtgcaaaacgtgaacaccgtcgtttaggccgtggtatcggttctggcgttggtaagactggtggtcgtggtatcaaaggtcaaaaatcacgtaaaagtggtggcgttcgtccaggtttcgaaggcggtcaaacagcgatttatcgtcgtttacctaaattcggtttcactagccaaatcgctttaaaaactgctgaagtacgtttgtctgagttaagtaaagtggaaggcgatatcgttagccttgaaactttaaaagctgcgaatgttgttcgtcgcgatcaaattcgcgctcgtatcgtgctttctggtgaaatcactcgtgcattcactgttcaaggtgttgcattgactaaaggcgctaaagctgcaattgaagcagctggcggcaaagtcgaggagtaatctcgagtgtctatgtctcctagttcttcaggtcatgtcaacatgatgaaaggtcagccatttcacgtgaaatatcgtgaaattattcgccggatgagttttctaatcggtgcattgctggtctttcgactaggagcgcatattccagtaccaggcattaataatgctgcgttagaaaatttatttcatgcaaaccaaggaactattcttgggctattcaatatgttttctggcggtgctttagagcgaatgtcgattcttgctttagggatcatgccgtatatttctgcatcaattattgtgcagttaatgtctacagtgattccttctctcgaagccttgaaaaaggaaggggagcaaggtaaacgtaaaattaatcaatatacgcgtcagggtacattattacttgcagtggttcaggcagtaggtatgtgtgcaggtcttattggacagggtattactctatctagtggtcttgctttttatataccagcagttacatcacttgtcgcaggaactatgttcttaatgtggctaggtgaacagatcactgaaagaggtatcggtaatggtatctcaatgattatttttgcaggtattgttgctggtttgcctaaattaattatgcaatcagtatcatctgtcgataatggtcaaacaagtttaattggtcttgttatctttggtcttttgtctcttggtgtattggcagcgattgtgtttattgaaaaagcacagcgtcgtattccagtaaactatgcacagaagcagcaagggcgtcgtatatttacagctcagcaaacacatctaccgttgaaaattaatatggctggtgtgattcctgcgatttttgcgagctctttactcttgttcccagctagtttgggtcaatgggtaggaagtgcagatccgaatgctggtttaattaaacgtagtttacaagatttagctttagtattgtcgcctggacagcctttgtatttggtgctctttggtgcgttaattatctttttctgttacttttatacggctttagtatttagccctaaggaagtatcagaaaatctaaaacgcagcggagcttatgtgcctggtattcgcccaggtgagcaaactgctcgttacttagatcatattcttaatcgtttgacgtttattggtgcgatttatattacagtcatttgtttgatgccaatgattctacaaagttcttttggtattccattctatttgggtggtacctcattactcattgtagtcgttgttgttatggactttatggctcagctacaagcgcatttaacttctcatcaatatgacaatcaaacattaatgagaaaaacgactgctcatcctaagggataagcgcacttagaggtttcatcatgaaagtacaagcttctgtaaagaaaatttgtggtagctgtaaagttatccgtcgtaatggggttattcgcgtgatttgtagcgcagaacctcgtcataagcagcgtcaaggttaatctaatcaagacctgttgatttcagtaggcgaattgggttaatatccgcccctcaagatttttgtggggcggttgattatctctactgcctttttggagaaaagtgaatggctcgtattgccggtgtaaacattccggataacaagcatgctgttatctccctcacttacatctttggtatcggtcgccacactgctaagaacatcttagctgcagttggtattactgagactactaagatccgtgagttggacgatgcacagcttgatgcgattcgtgcagaagttgctaaggttcctaccgaaggtgacttacgtcgcgaaatttccatgaacattaaacgtttaatggatttaggttgctatcgtggccttcgtcatcgtcgcagcttgcctgtccgtggtcaacgcaccaaaactaacgcacgtacccgtaaaggtccgcgcaaaccgattaaaaagtaagatttctggaagctaaaagatggctaaagatactcgcacacgcaagaaggtcactcgtaccgtctctgaaggtgttgcacacattcacgcgtcttttaataacaccattgttacgattaccgatcgtcaaggtaatgcattggcttgggccacctcaggtggacaaggcttccgtggttcacgtaaatcaactccgtttgctgctcaggtagctgctgaagttgctggtaaagcagctttagattacggtttgaaaaaccttgacgtccttgtaaaaggtcctggtccaggtcgtgagtctgcggttcgtgcattaggcgcagtgggttataagattaacagcattaccgatgtgactccaattcctcacaacggttgccgtccacctaaaaaacgtcgcgtgtaaggagaaacattcatggctcgttatattggtccaaaatgcaaactctctcgccgcgaagggacagacctgcaacttaaatctggcgttaaaccatttgacgtcaaaactaaaaaagctaacaaagcacctggtcaacatggtcaggctcgcggtggtaagcaatctgagtattcactacaattacgtgaaaaacaaaaagtccgtcgtatttacggtgtgttagagcgtcaatttagtaactactataaagaagcagctcgtgttaaaggcgcaactggtgagaacttgttgaaattgcttgaaagccgtcttgataacgttgtttatcgcatgggttttggttctacacgtgcagaagctcgtcagttagtaagtcaccgtagcattactttgaatggtcgtcgtgtaaacatcgcatctattcaagttaaagctggtgatgtaattgcggttcacgaaggtgctaaacaacaattgcgtattaaaaacgcgattgaattggctgctcaacgtggtattccagcttggatcgaagttgatcactctaagcttgaaggtacgtttaaagctgcaccagatcgttctgatttacctgctgaaatcaacgaaagcttgattgtagaattgtattctaaataatccttgaggtagcaataatgacgcgtactgcaaacgagtttctaactccgcaagcgatcaaggtcgaagcggtaagcgggacctcggcaaaagtgattctggaacctttagagcgtggttttggccatactctaggtaatgctttacgtcgcattctattgtcttctttgccaggcgctgctgtggttgaagtagagatagaaggtgtcgagcacgagtacagtactttagaaggcttgcagcaggacatcgtcgagctcttgctgaacctaaaaggattgtctattaagctgttcgatcaaaatgaagcttatttaacattagaaaaacaaggtcctggtgacattactgctgccgaccttcgtttacctcataatgttgaagtggttaacccagaacatttaattggtactttgagtgctacaggctcattaaaaatgcgcttgaaagtttctcaaggtcgtggttatgaaacatctgactctcgtttccctgaaggcgaaacacgtcctgtaggtcgtttacagttagatgcttcttatagcccaattaagcgtgtttcttacaccgtagaaaatgcgcgtgtagaacaacgtaccgatttagataaactggtaatcgatcttgagaccaacggtacggttgatcctgaagaagcaatccgcaaagcggcaacaatcttgcaacaacaaattgcaatttttgttgatcttcagaaagaccaaactcctgttgctcaagaacctcgtgaagaagttgacccaatcttgcttcgcccagtagatgatctagagcttactgttcgttctgctaactgtttgaaagcagaaaatatttactacattggtgatcttgttcaacgtactgaagttgagttgttaaaaactcctaaccttggtaaaaaatcgttaacagagatcaaagatgttttggcatcgaaaggtttacaactcggtatgcgtcttgagaactggccaccagctagtcttcgtatggacgaccgttttgcctatcgtagccgttaattaagtaggactatcaccatgcgtcatcgtaatagtggtgtgaaattaggccgtacaagcagccatcgtaaagcgatgttccaaaacttggctaattctttatttgaacatgagttgatcaaaacaactttgcctaaagctaaagaattacgtcgtgttgctgagcctttaatcactctagcaaaaaacgatactgtagcaaatcgtcgtttagcatttgctcgtactcgtaatgctgcaactgttggtaaattatttaccgtactcggccctcgttacaaagaacgtaacggcggttatctacgtgttcttaaagcgggcttccgtgctggtgatgcagcaccgatggcttacgttgagcttgtagatcgtgaagtgaacacttcagctgaataattgatattattcaaaaaagaccggctttatgccggtcttttttattttccaaaaaatataaaattaaaaatttgtccccaagtgacataaaaaaacggataaacggtcaaacttgacattgtgtattgtcaaaattgtgatttaataaagttatattctcaacaatgggtataaaaataaaatggaaaagcaagttgatgtattaatcattggtgcaggcatatcaggaataggagttgctgcccatttatctaaaaactctccacaacgtcagtttgaaattttggagcgtcgtgaatcgtttggtggaacttgggatcttttccgctatcctggtatccgttctgattcagatatgtctacttttggttttaactttaaaccatggcgcaaagccaatgttctcgctgatggtgcctctattaaaggatatctaggggaagtgattgatgagtttaagttaaaagaaaaaattcattttggccatcgtgtcctttctgcgaattatgattctgccttgaaaaagtggcatgttattgtcgaggacaataagaaaaaacagcagacttgggttgctaacttcgttgtaggttgtactggttattataattatgaccaaggttacgcgccgactttcccaaatcaagaagctttcaaaggtcaactcattcatccacaacattggccggaaaatttggattataagggtaaaaaagtagtaattattggtagtggagctacagcaattacactggtgcctgcaatgtcaaaaggtggagcaggtcatgtaacgatgttgcaacgttcaccaacttatattgcttctgttccgtctattgatttcatctatgaaaaaactcgtagatttatgtctgaagaagcagcctataaatttacgcgtgctcgtaatattggtatgcaacgagcaatttatgcattgtctcaaaagcatcctaaaacagttcgtcgtttactcttaaaagcaattgaaatgcaacttaagggtaaagttgatatgaaacactttacaccttcatataatccgtgggatcagcgtctttgcgtagttcctgatggtgatttattcaaaattcttcgtgaaggtaaggcgagtgttgagactgatcaaattgaaaaatttactgagactggtattcaattaaaatcaggcaagcatcttgatgccgatattatcgtatctgcaacaggtttgcaggttcaaatcatgggcggtgtgcaggcaactattgatggggaaccagttaaatcatctgaacacatgctttataacggcgtgatgctcagcgatgtaccaaacatggcgatgattattggctatgtaaatgcttcatggacattaaaagttgatattgcagcagattatatctgccgtttattaaactacatggataagaataattatgatgaagtgattccatctggtgataagagtgtgatggaagaggacacagtcatgggtagcttatcatctggttatattagtcgtgctgccgacgtgattcctaaacaaggtaaacaagcaccatggcaggtaaccaataattatcttgaagaccgaaaatcattaaaaaatgcaaaatttgatgatggtgttctacgttttcataagcattcagaagttaccacacgtaaaccaaaattagtgtcttgatattcgaaaataaaaaggaggctataagcctcctttttatagtaaagattaaagagttctagagattaattctttcataatttcattggtgcctgcataaatacggtttgctcggtggtcgatataagcgcgtgcaattggatattccatcatatagccataaccaccatgtaattgaagacattcatctacaacttttgaaaacatatctgaaattttatattttgcagccgctgcagcttcaacactcaatttttcatcgagttgtaattccatacaacgatctaaataggtacggcagaaatctatctctgttctaagttcagcaagtttaaaacgagtattttggaatgctccaattggtttgccgaatgctttacgatcttttgtatattgaacagtatgtgcaaatgccgcttctgccccggcttggcagataatagcaactagcatacgctcccacgctaattctttcatgagcatgataaagcccataccttccatacctaaaagattttctttaggaacacgaacgttatcaaagaagagttcacaggtatcttggcctttcataccaattttgttaagtggtttgcccttagtaaaaccagcacggtcagcttcgacaataatgagtgataaattggcagatcctttatcgctattccccgttttacaaacgacaatcgccatatcgcataaatagccattggtaataaatatttttgaaccattaatgacatattcatcgccatcaagaacggctgttgtacgaaccgcttgcaagtctgaacctgttcccggctcggtcatggcaattgcggtaaccgtctcaccagtagccattttagggagccatttctgtttttgctcttcattaccgaagttattaatatagttggctacaatgtcggaatgcagtgagaaacctgtacttgagtccatcgcataggcttgttcttcaataagaatcatgctgtataggcggtcgacacctgcaccaccatattgttctggcatagtagtacagagtaaacctaaggcaccagctttattccaaagatctcggtcaacgtgttgttgtttttcatatttttcaatattaggtacaacttctttctcgtagaatttacgtaccgtttcccgaaaagcttcatgttcttcgttaaataaatggcgaggtaacatatttggaatgggacgaatagcaccagattgcattgtatttcttccttggtttgggcttaatgttatgagctaaacataagggaagcgactaggtctaacaatgtgatgaatgctcatttatggcggtgaagtgataagtttggtcaatttgatatttttagcgaactttctcatgtgatcaggtaaactaagcgcactatcaacgcagatggggaaataaatgtctgaagaaatgaccttggaagaacgtaaagtaatctatcgcgcacgtcgtggtttaaaggaaattgatgtctattttgacccttatgtgaaaaattattatttaaaggcagacccggcagaaaaagcgttgtttgctgagttggtagaacaggaagaccctgatttactagattggtttatggaagtatcagaaccaccacgtaccgaattacgtgactttatctataaattaaaacactatgttcatggttaatttattttgatcaaccatttgaattttaagctgaaatatagtcgtttttcgattatatttcagttttttattggcttaagcttagcagttctattttatcaattaatgccgttactatggtggttagttgtaatcagcttactatttatcagctttattttctttttaaagcgtccgcagcttgcacaaattgcttatttagataaaaaactatggtcgcttgcttataagtcacagaacaccgtttctcgcgtcaaaattttaaaaataattgattgtcagattttcatagtgatctattttgaaggtcataaaacactaacttctatcatttggtttgatcaaatgtcattagcagagtggaaaaagcttaaaactttagaaaaactctattaattgttagacaattctacatttgtatatttatttaaaattattattaatcaatatcttatcttttatttctttttgggaaactgaaattgtctagttaaaatacagaaaaaacagcaagaaagttaattgtcggacaatttctcaatatggttactattctatcggttaaagtacaaacaccaacgtaaagtgtgtcggaggtctcaaatggagatgccaacatggtcgttcttggtcattgccataattatggcggtggtgataggaagagcaggaactttactcagggaacatcttaaccgagttaatcttagcaaagttaagagacagaggatgcaaaggtcatcgatcagtcaataatctaattggttaatcgattaatttcatcaagtgtccagtttttaactgggtgcgaacgtagtaaggaggtctctcatggagatttcaatgtggatgtttctgttgattgcagtaattatggcagtagtagtaggaagagcaggaactttacttaaggattatctagaacaacaataatataagccgttaaaagcttatcccagttaataagtagcatgtgctgaaccgtcgcaatgctacttttttttgcctaaaatttttgtttccctgaaaaactgtcaattttatctgctgtgaagtgtgtcaaagtataagcgctacaattagagtaattactcttttattcaagatatgcatctgctaatgtacatctgaaaaggaaaaaacaaattacatcgaggacaggaagatgtctaaagtccaaaaaatatgccaaggtttggcggtaagttttcttgcagcttcagttttatcaggttgttcatacgttgtgaaaagcggagcaaatgttgctttaggttttacggaaaagcacgtcgttccacctattttggcaatgcaagatgctgaaatggtttgtaatactggtagtgccttaactcctgcaatcatgtcgactaaaggtatgggggcagatcctactcgtgttgctgtcttaatgtatgctgcttcaggtgtatgcgcggaaaaccaagcattagaacaggagttacgttatttgcgcgcttcaaaagcagggcaggtaacagaagctcaagatgcacgtattgcacagaagcgttgggctgcaattgctgctgagcgacaatacgcaggctataagctctttgctgatcgttgggaatctaaatataaatatcatttaggtgattcttgtccaacaatgcgtagtgatattgaccaaactgtatatttacttgggatgatcagtggtcttcaagctgtgaccaacgacattaactctggcggttctgtcaatgttccgaaagatattgctgctattgtagagcgcggtatggtctgccttgataatcaaaaattctggggcgcaccaaatgcaacgcgcgcagtgatctggactttattaccaggcgctaatgaagggaagcccgatccatatgagactttaaaacagtccgtgcaaattggtgaacaaaaaggtgttcgtttatctcatgcgttatatgccgtagctgctcaagcgagtggtgacgatgccaaaatccgtgatgcattaaaaacttatgctgcatctcaagcagatgacaaaccagtcaatccgaactttaagttaattgatagtatggctggtttaattgtgcgcggtatttctgaccgttactggactgagcatactggtgttcgtaccggtgatgacggtatgtctcatttctgggatgagaaaaacgaaggctcagctgaattggatgagttgtttgatggtggagctgcatcggaagccccagctgacacaaaaactgcaccagcacagtaaatagatctgaaggaactcactccttacggttactaactctagtaatcgtaaggagcctggtttaaaaggagtgtgctatgaaagatcatgtactcaataaaaaagtgcttttggtcgcagggtgcatttctgtttctgcatgtttacaggtgtttccggattattttatctattggcgtgaaagcttactcggcgagttctggcgtttatggacagcacactgggtacatgtcggatggattcactttcttttaaatatgatggcatttgcgtgtttgcctttcatatttccccataccaaagtgtggcacattttaagtcttcttattcttttaccaccttttattagcttggtgttctatttttatttgcccaatatcgatgcatatgcaggcctttctggggtactccatgggttatataccgcagttgctttggtttacttgcaataccgtaaagaaaggaattttgcatttctggtcttaggtttaattgttgcaaagttaatttgggaaaatacatttgggcaaacaggaacagcacagctcattggtagtccagttttaactgaagctcatctatatggggcgattggtggtgcaatctttggaggatgctattggctcatacaaaggttcaaatagaaagattgacaatacaaactgttaaaaaagtgattttagtcattctttattgataaagtttgatgcaaatttgatcgttgaataaagggattggtagaagggggatggacgatacccctgaccaaggaaattgcatgactcaaagcctttgttatgagggatttgagagaacaaaattggaatatttatgcaagaatatcaagaaaaaagatctggattaggtctgctgggttatatctggaatgaatggatctcaacattcattatcctcattttactattgatgacgctcataattggtaccggggaaatgatccacggtcaattattacgtatcggggaacgtctttatggtgaccctgctacaggcatgcaatattcattcttgcgtgctgagcctgaaaagccgacttgtgatcgacatccgaatattgatgctcaagtaaaagagcagatgaaagcaaatgcatctgatgattttgcgagcttctttggtgctgcatcggaaagtgatgtccgtgcatccttactggcagcacagcagcaatgtgaagaaaaatatcaggcttatgacaaaactattaaatatatcgaagcaaacccgggagtacgtacttatcgtgcgatcgaaacaggtttctttggtatttttaaattcggtacagagaaccgtgccattttactggtctttatggtactgatttcagcgattactgcatcattgaaataccaccatattggcttgcgtaatccagcaacaaaaatagattacaaagtgtattctctatttatgttgattggtaatgcgctactgagcttctcggtcattagccagtatcgttcagtcattaattcaggggtaacacctacttatgaaacagtaacgatttactggatatggatgattctgtttgttgttctgaccttaattagtctgtatcaactatttgtttcacctccaccaaaacgtgaaggcggtaatataggtttagccttactttctgtacctttatatgcttatatggcactaattacaggtattgtattcacgttctttatggattatccaatggggcaagggatttaccttggtttattggttgagttctcgggtatcttcttaaatcttgccttatttatttgggcgggtatgttactcacgcaaacccgtgttatggacttgttcttaaatgtacttcgtccatggaacttggcgccagaaaccttaacttggttaattctgattgctgctgctgtaccgactgcttataccggtgcttcggggattttcgttatcgcggctggtgcgattatttataaggaagtttggaacgcaggcgctcgccgtcaatatgcattagctgtatctgcaatgtctggctccctaggggtggttgtacgtccatgtctcttggtcgttctaattgcgatgttggatagtcgtcatgttacatctgatgaattattcggacatggtatttatgtcttctggctaacagcatttattttcttgggtgtatcccttttattggcagaagaaaagttccgtgtgaactcgccaaaagtggcactaccaggtatggcacgagctttcgtaccagttattccatatatcttaattactgtagttgtccttgcattttataaatatgcattagatacaggaatgaatgaatttactgcaccagtgattctgccactcgtgcttattgcgatgattctgtacgataaaatggttatgcctaaagaggcaccagctttaaatattcatgaggcgattgttcgtgagcatgaaaagaaatcaccgttcttacagactcatgatccgcatagttcacagttccgtcttggttttagtggtgctttacgttttgcgacatcagaaacagtggggcatatcggtgccttaattattttgatggcattgtctgcaagtgtaggtggtttaattgaacgctctgaagtggtcgaattattaccaactcatttaggtagtatctatatatcactggcatgtattgcactgttacttgcaattattggtatgtgtacagatccatttggtgccgtaattttagtggcagcaactattgctcctgtagcttacgaaaatggtattcatccaattcacttctggatgattgtattggtcgcattcgaatttggttatgtaacgccgccagttgccttgaaccatctattaacgcggttatccgttggtgatgatgaggtgaatgctgccgatgcagaagccaaagagaagtacacaagtttctactaccgatatgaacgctggttattaccaattattgtcttgttctcatcattggtattggtaacttatgcaccactaatactgaaattatttggttggtataagtaatttaaatatataagccgagcaaaaacactctctttaagagggtgtttttttatgtggtagttatttgaagcatataaatttttagtaaataaaaaagctagctcagagtgaactagctttttgcatcatatctagagttaaacaaatactattgttgtttaacttgggcctcaagaagcttcacttgctcttcttttagcttaataagttgatctgcatcagcatgttgagcttttaatgtcgcttcctgatcttgcaattgacgatgaatgtcattgagtttagacacttcctctttagctaaagattcttgagcaggaattggttgtttgagcacatcttcattcacaagttgctgtgagttagcagtttgtgtttgaactacgggttccgagctttcagatggatttgtagttttttcaggagctggtaccgaggctggttgtggatcaaccattggcgctgatgtttcagtttttttgaaaaaccattgtgctgcgaaaaaaagcacgacgagaatgcttaagcccccaattaaaatccacaatagttttgagttttgttttctttgtagtggcatgtctaagacctttagtcagaacgacgaggcttgaactgtattaccccaatttcatcaggtatagcgggcgtttcaggctcatcaatatgagtcggacgattttcgctataaccgcattcgatacattcaatccattcgtcttcagcggtggttagcatgacaatccgatctatggcttcacattttggacatttagccccagcaatgaaacgtttcttcatctttatcaccctaaccacacgatcaatttaggcccatagtttaagcggttttgttatcgttcgtccaaccttgatgacgtaacaatgcatcaatttttggctcacgaccgcggaaattcacaaatgcttcaagagcagtatctttcccacccaccgctaaaattgcctgacggaattctttacccgtttgagtattgaaaataccttcattttcaaaacggtcaaaggcatcacttgctaaaacttctgcccatttgtaagagtagtaacctgctgcgtagccgcctgcaaaaatatgactaaagctatgctggaaacggttgtagtcgacggttggaactactgcatattgtttgcgaatatcatttaaggtctgctgaatttgctcactattcaacgcaggagttttggtgtgaatagttaagtcaaataaggcaaattcaagctgacgtaaagtttgcataccagactggaagaaacgtgcatttaataaagcatcaagtaactcctgaggtaaagtctgcttgctctcaatatgctcacttaaaacatcaagactttctttatcccatgaccagaattccataaactgacttggtaactcgactgcatcccaagcaacgccgtgagtacctgcaactgagatattatctacttcagtaagcatatggtgtaagccatgaccaaattcgtggaataaggtgatgacttcatcatgagttaataaggcgggctggttgcctacaggtggagtgaagttacacaccatatagcaaattggtttttgtaaaccatgaacagtttgcatacgtgagcggaaaccactcatccatgctccaccacgtttccctgtgcgcgcatataaatcaaagaagaagccaccaacaacttcaccttggtcttctaactcaaaataacgtgcatctggatgccaaaccggagcttcacgttcaacgatgttaataccatatagacgctgtacgatctggaataatccctgaatcacttttggtgcagggaagtaaggttttaaagcttcttgtgataagttgaattgttgttgtttaagcttttcagaatagtaagtggtatcccaaggtttaagctcatcaataccatcttgtttggcaatagcttggagttcggcaacttcttgaagtgcaggggtacgtgcatgctcagctaggtcgaccaaaaagtcgtgaactgttttgacatcaggagccattttgctggcaagagaatattcagcatagttattaaaaccgagtagttttgccatttcttggcgaagactcaggatttcttccataattttgctgttgtcaaattctgtttgctcagactgatctgatgcacgtgtgacataagctttataaagctcttctcgcaaggcacgatcatcggcataggtcatgatggcaaaataagctgggaaatctaaagttgcgactgcttggtcaagctcacgctgtttaccgtactgttttaataactcaacattactttccggaagaccttttaattcgtcttctgtcagtggtttaaaataagcctgtgtcgcatcaagtacatggtttgagaagtcagaagaaagctgtgaaagacgtgcagaaatttcagcgtaacgttttttctcttcaccctctaaagcgacaccagaaagtttaaaatcacgtaaagcgagacggatggcactttgttgcgcagggcttagctttgaatagctctgactatcatgtatgagttgataggtctgatataacgccgtgtgttggccaagctgagtgtaatattcacttaaagcgggtaatagtgattgatagacttctctggtttcagcattgttcatcacagcatttaaatgtgacaacactccccacgattcactgaggttattttcaagtgcatcaatttgttcaagcacggcaagttgctggtctgtctcggatggtgcagccgtaagggtgtttaaaaactcttgtcctgcttgaatcgcttgttgaatatcttgttttaaattatctaatgtaatttgatcaaagcggggagtaggtagagtcgcttgctgtaaagtcattgctaatagccacattattttttaaacatagtattagatgtaggtattgttaggcaggaaatcaagcttaatttaaaaaataaacgttttaaaaacattaagcccccattttgggagcttaatcataattaatgcaaatacctatgaattagtcagccttagacttggcgtttgactttttctttttaggtttcgcttttttctttactttttctggtttggcctctgcttttgtagaggttttcttacccgactttttactatatgaacttggtttgcctttttccttctttttacggacaggtttttcaccatcagttgatacagatggtttaccaaaaacttcttctgttgcttgtgtgctagttttggttgtgcgtggagcacgactacgaactacacgtccagcatgagtaacttgtttaatgagttggaaatcgattttacgctcttctagatttacaccagcaacttgaattttaacttcatcgcctaaaccgaagacttgaccacgattttgtccaatgaggttttgactggcttgatcgtaaataaagaaatcatcgccaagttggctaatgtgaatcatgccatcaacataaagatctttaagagtaacaaataggccaaattcagttaccgcactcacaataccaatgaactcatcacctaaatgttgttgcatatagtggcatttcaaccaagtcgttacgctgcgggatgcttcatcggcacggcgttctgtttgagagaaatgttcacctgcatcatctaaagctgcaccggaaagtgggtaaggcttttgttttagatgagctttaattgcacgatgtaacaataagtccgggtagcggcgaattggtgaagtgaaatgtgtataagcttcataagctaaaccatagtgacctgcatttttggcaccatagtaagcttgcatcattgagcgtaataacacggcgtgaatgcttggcgcatcaatacggtctttagttgcctcaataactttttgatagtctgcctgagttggttggtcagggaaaggtaaacccaatagttttacaaaatcttttactttttgaatacgtgagaattcaggtgcctcatgtacacgatacaacatcggaatatcatgttctaaggcatattctgctgctgctacattggcaagcaacatacactcttcaataagcttatgagcatcattacgtgtacgaggtaaaatttctttaattccacctaactcgtcaaaggtcatataagtttcaatggtttcaaactccattgcatgacgatcaacacgtaagtttttcaaaatctggtaaagctggaaaagtgtatttagcgatttatgaatatcacgatcttttggaattgcatcagtggcaccttcaaaatattgtcctacttgtgtataggtcaaacgtgcttttgaatgcatgactgccggataaaattcataacctgtaacacgacccgtacgagaaagttttaggtcacagaccatgcataaacgatctacgtgtgggttaagtgaacacaatccatttgataatgcttctggtagcattggtaaaacaaaatgtggaaaaaaaaccgaagtgccgcgctcttcagcttcttcatttaatgccgaatctaatcgtacataatggctcacatcggcaattgcaacgacaactcggtaaccaccaccaggacgtttttccgcatatactgcatcatcgaaatctcgcgcatcttcaccatcgattgtgacaagtgccaagtctcttaaatcaactcgaccttcgcgatcttgttcagcaggttctttgaaactttcagcttcttttataacttcatctggaaattcgtaaggcaaaccaaactctaaaatggtttgcggaataataatttcagtatcggctttatctgccatagactgaataatatgtgccgttgcaaattcttcccgggttgggtaagtgtctatagcaacacgaagcatatcgccgacatttgctttagcatgttcaactaattctttttctagtgggataggttgatgctgatttggattgttaggctgaataaaatattcgccctcatgtaccgacaatttaccaattaactgttttactcgatgctgtataacttcggtaatgaaaccccatggtttacctttgcgatctaccgatgtctgccgaacacggacccgatcaccattaaagactaaacgtaactcacgctcaggtaataacaaatcatcttgaccatcaatatgtgctgtacccaaacctttactattaatatagacagttgcttcataggtaggttggtctgccaccaactgaaacttaaaaccatccttcataagttggccatcacgaaccatagcacttaagcgatgacttaaggcttcaatacttttctgatcttgaatatgaaaatggtcaacaagttctgcatgagattgcggtgtttgcaattgttccaacgtatctaaaataagagtacggcttggaataggattgtcataacgttcagcttcggcttttgcttcggggtcaacccagttttttgtcatgtcgtttggtttcatgcttggcagataggtttagcataagacatgcagaccagaactgcacgttcaggtttgcaataatgtgttatgcactactgtgttgaaataaagaaataatatctatcttaacaagcgtttgattgaaaaaggcgaaaagaatacgaaaattgtttaaaaaatatttaattgaacgaaaaaacaagaaaatttcagtatcatgacttgaacaatgtagttttagtttgtattatggcggctcgttccggtgaggtggatgagtggctgaaatcacttccctgctaaggaagcatacctattactggtatcgagggttcgaatccctctctcaccgccatttacttaatgcgctcatagctcagctggatagagcacttggctacgaactaaggggtcgggagttcgaatctctctgagcgcaccaagtaaaatcgaatgaatcgctgaaaagcacacaagttacgcgctcatagctcagctggatagagcacttggctacgaactaaggggtcgggagttcgaatctctctgagcgcaccaacttgaagaattaaccgcttttatagcggtttttttgtatctgctgtttattaatttttaaaaatctaaattttataactttttaattatattagagataacgataaatgaatctggctttattcgattttgatggcacgatcacccataatgataccttcagtttattccttaaattttctttgagtaaaaaaactcaaatattaggtggcatccgtcttgcaccttatatagcgggttataagcttgggtgggtaacggataaaacgatccgtactaagctctgccaagtgggatatatcggctatgatgcagcttctttgatatgcaaaggacaagagtttgctaaaaaagtaattccttcctgtattcgtgaaaatgctttaaaacgcattctctggcataaacaacagggagatcaggttgttgttgtatctgcttcattaagtgtttacttggaaagttggtgtaaatctttagatctggatgttatttgtaatcaacttgaaatagataatggtattttgacaggttattttattgatggtgattgtggttatttagaaaaagtaaatagaataaaaaataaatatgacttaactcaatatactataatctatgcttatggtgatacacctaatgattatgcgatgttggagttagctcatagaaaatattataaatggcaagagattaattaatatttaaaaatatattaaaaaagaaagccacttatataaagtggctttctttgtaattattaaacagtattgaatgagttttctaggaagttatcagtaagtaatgatgtcggtacgatcgtatgcgttgtatttgttacgctagatactgtagaagttacaccaccgagtaagctaccaccagtcaatccgcctagcaaattagaaataacatctaaactgccttcaccagtaacaccacccgttaagcttccaacgatatccgttacgataccgatagggttgtctgtaccgccagtaacaccaccagttaaaccgccgagcagatcagtgactacgccaagcggactgtcgccacctacgctaccagttaaaccaccgagaaggtcagtgactacaccaagcggactgtcgccgcctacgctaccagttaaaccaccaagtaaatcagttactaaacctagtgggctatctccgccagttacgccaccaatagttcctgttactccaccaatgatttcagttactaaaccagttgcagttgtaccatttgtaataagcgtatcgagaataccggtagccgattcagtagcgccttgaatatcaccaccgactaaatcagacacaacttcaagagcaccattgaccgtgtcacgagacgtttcaaaagttaatgtgccaaggtctgcaatttcagaaactggatgttctgcttgtggaaggataccgataattgtatccgcaactgtatcaataccagtattaataatttcagtttttaggctttcaacgccttgaagaatatcgatgccaccttgaacaacatcgattactggagaaataggagatgtaccgccaccaataataccaccggttacgccgccgataatgtcagttactacaccaagcggattgtcaccaccaataccgccagtaacaccaccgataatatcagttactacaccaagcggattgtcaccaccaataccgccagtaacaccaccgataatatcagttactacaccaagcggattgtcaccaccgataccgccagtaacaccaccgataatgtcagtcactacaccaagcggattatcaccgccgataccgccagtaacaccaccgataatgtcagtcactacaccaagcggattatcaccgccgataccgccagtaacaccgccgataatgtcagttactataccgagcggattgtcaccaccgataccaccagttacgccgccgatagtacctgttacgccaccaagaatatcagtaacaattccagtcgctgttgaaccattctgaataagtgttcctaaaataccagttgcattttcagtagcaccttgaatatcgccaccgactaaatcagaaacaacttcaagagcaccattgaccgtgtcacgagacgtttcgaaagttaatgtgccaaggtctgcaatttcagaaactggatgctcagcttgaggtaatacaccaataatagtgtcggctactgtatcaataccagtgttaataatttcagtttttaggctttcaacgccttgaagaatatcgatgccaccttgaacaacatcaataactggagaaataggagatgtaccgccaccaataatgccaccggttacgccgccgataatatcagttactacgccaagagggttatcacccccaacaccaccagttacaccgccaataatatctgtaatcacttcaagtgggttgccatcaacaccgccagttacaccaccgataatatctgtaatcacttcaagtgggttgccatcaacaccaccagttacgccaccaataacatcagtaacacttccaaccacaccagtaacaatacctgtagcagttgtgccatttgtaataagcgtatcgagaataccagtcgctgattcagtagcgccttgaatatcaccaccgactaaatcagaaacaacttcaagagcaccattgactgtgtcacgagaagtttcaaaagttaatgtgccaaggtctgcaatttcagaaactggatgctcagcttgaggtaatacaccaataactgcatcagctacagtttcaatgcctgtattaataatttcagtttttaagctttcaacgccttgaagaatatcaatgccgccttgaacaacatcgattactggagagattggagaagttccgccgacaacaccacccgttactccgccgataatgtcagtaacaacttcaagagggttgcctgtaacgccacccgttacgccgccaataatattggttacagtatcaattgggcttgtagaacctacagtacctgttacggtaccaactacattagaaactaagtctgtggttgtatgtgaaactgtatcggttacagttgaaatcacattagaaagtaagcctgttgttgaaacattagcaatgttgatatcagaaacatttacattaacagaggaacctgtgtttactacaggggttatcgatacaatattacccaggtcctgagtaacttttgatattgaagagacgagatttttcagtaagaacatggtggtctatttcctgtgtatttatgtatttttaagtaagtatttatatattgcgttacgcaattattgagatatgtatcgcaataattaaaaattagtattgtgtagatctcaaaaagtgtcaatgcatatttctactcaaataaattgatacttataatattttgacaattagttattctttagatttagacataaaaataataatttttttataatatattctttatagatgaatacattttttctttatttttttattattttttatgaatattaaagctaactaattttatttataaaaagacttttgcataagtagaaatattttatttatataatcctgactaaaaaactagacttttgtttctgccaatttggccaaaatgcccaaattagatacgagaaatagagaactttaattgaaaaaaaatatttcaaatacattttataggcaatcatctcgacttttttgaagctaatctacttaaatatttcattatggctaagaactagacgcttgatgacaaaaagatgaaaaatgtctttctaaaatgaaaaaactgcgtataatgccctccatcaagtacgcgctcatagctcagctggatagagcacttggctacgaactaaggggtcgggagttcgaatctctctgagcgcaccacttgaagaattaaccgctagatatagcggtttttttgtgcctaatttttatattttttttaataaagaaagctggtacttgtgataaccagctttaaaaaaatctaaattcgaagctatttattagccgaatgttttgaagcggctttcatcatcaataaaagctttttcgcctgctgcgccttcaatagaaccaaaaactagctgagctcttagtttccattctgctgggatattaaatgaggtattaattttctcatcaataattggattgtagtgttgcaatgaagcaccaatattttgttcagctaatacattccaaactgcaaattgagcaattgctgttgaatgttctgaccagatcggaaaattatcggcataaagttcaaattgctcttgtaagcttttaataacgctctggtcttcataaaacagaactgtacctgcgcctgctgcaaagctttgaattttttgttctgttccagataccgcttcagctgggataatggtttttaaaacttctagaactgtattccagaatttatgatgtgattgtccaaataagatcacagcgcgagatgattgagagttaaaagctgaagggctgtgtcttattgcttcttgaattaacttttcaatctcatcatttgattggcttaagttattgccaattgcataaatagagcggcggtttttaatgagttctataaaagaggtttcatttgaaggttctagctcttgagcagctttcaaagccacatcttcttgagctgttgttttttgtttgaagccaaatagttttgcaaagaaagacatgacgaattccacgaaaagagacaatagaagcattctataaatttaaaaatatgaaataagccttataaatatgaatctacgttctatatatgaaacgcataagtagcttgtactaataaaagctttacagttaaagcaaaaataaaaaatcacttttgattcattttaaagcgtagatgaatatgctctaatagtttcgatttattcaatattgatacattgtgatgaccgagcaaaaaagcgctttatctttacgttattatttaaatttagaagagtctcaagacggatttggcttggtgacattcggaaagaaacaattcacacggtttttgacacctgttattagtattgcaattattatttggggcttatatttaggcttttcaggtgttggccgctactatgttgctttaggcgttttcttcttggttatgcaaggtctaatgcgctactggcttttacctatgatgtttaaacgtcaatttgtacgttatcaatttggtaagagcgagcaaggaatcgatttatatcaagattattttgagctctatgctgctgggcgtaaacaagctgtacagtatagtgaagtgcagacttttgctaaaggcaagctgacttatatgcttgagcttaaaaataaaacggtcatcattgtgccgaaacgtgcatttgctcaggcttcagatcaaactatatttgaaaatacatttaagaaataagttattggaattattagccgcaacaataaaggaagcttcatgaaaacacgtccttcaaaaatcgtttgtgtgggcagaagttatgctgatcatgtaaaagaactgaacaatgcaatgccaggacgtccggtgttatttatcaaaccaccaagtagtttgattggtttagatgaaggcatttcatggaatcctgcgtggggtagttgtcatttcgaatgtgaatttgttttacgcattgatcagccactaaaaggagaaactgatccgcaaaaagtattgcaggccattggtgcagtgactttaggattggatttaacattacgtgacttacaaaatgagttaaaagataaaggccaaccctgggaaagagcaaaggcttttgatggttcatgtgtgcttgcagactgggtagatgtgagtgaaatcacggactgggaagagactagatttactttccatattaatgatgaattacgtcaagatggtaatactgctttgctcatgtttaatattgcttatcttttagtagatattaatcaggtgttctcacttgagccaggcgatgtcattatgacgggtacacccgcaggtgtagggccattaaatgctggcgatcagttaaaaatgactttgaaaggtgctactcaagattttgtttgggaaacatttgttaaagcataattttatttaagttattaaactttaaaccctattattaaccggataatagggtttttttattatactcaaaattaatttattgatagagctttcggaactggtctggggtaaaacccatccaacgtttaaacatataaataaatgccgatgcgctggcatagcccaaatcaaaagcgatactttctatggtttttccttgattaagcatggtcattgctttcattacttttaatcgttgcctccattcatgtaaagacattcccaactctttttgactgtaacgtgccaacgttctttcagtcatatttattcgttcagctaattcttgcaaggtgctgttatcggcagggcattggtgtaaatcatttagaatttttgctaaagctggatgatctgttgtaggtaaataactacccactaattcagcctgtatgagttgatctaataaaacttggagtaggcgtatatattcgacttgggtttcatcgtgtgggttttgcctcaagtgatcgagtaaagcaggtacaagtgaggaagttaataatataccagctttctgcggtaacttttggcacagactttcatgaacatataaagttgcatgagtcacttcgttgcggttaataccactgtgtttggtataaggaggaagccaaataccataaggtggcggggttaaataattaatttgatcaatattaacttcgagtacaccactaaacgcataaataaactcaccccatgcatgcgcatgttgaggataaaccgtttctgcgggtgcattacgaacacggaaccaaagcaaatcaggaattgcgttatgagccggaatttcctgaaaatcctgcacacgttgagctgattttttcatctttgaaaattgcctgaaattgcttatgtattgtctgtttttcactatatcatctaaataagacagttctatagtcagatttttcgctataaataaaggtgctaaatggaagagcgcaaaaatctggataccagagcttcggctttaatggtgcttttatgtatggtcttagggctgcaacaggtagttctgaaaatagcagcaccagatatttcgccgattatgcaaattgctttacgttccggcttatctgctgttctagttttacctttattgtggcgagatcattcgattcatctattttcttatagacaatgcaaagctggcgctcttgttgctttatttttttcattagaattttatttcgtcacccaagccttaaagtttacctctacctctcatacagtagttttactgtataccgctccaatttttgttgcattagggcttcattggaaatttcctactgaacgtctgaatcgagcgcaatggggtggtattgctctggcttttatggggatcattcttacattttacccaacaaccacagctacaaatgcgccagctctagcacaagttttgttaggcgatttatatgcacttatggctgggcttgcatgggcactcagtacaattattgttcgtttatctcctttagctcaagcgccggcaactcaaacattgttttatcaactatttggctgttttgttctactcttattaattgcttttttaacaaatcaaacaacaattcatttcaccactttagcgatcttaagcttaagctttcaaactttaatcgtatcttttgcaagtttactattatggttttggttattaagaaattatcttgcatcacgattagggatattttcttttttaaccccattatttggtgtgttatttagtattttgttattagaggaaaaactagaaattaaatttatttttggaagtattttagtgttgtcaggaatagtcatcatgagtctaaagcagggcaaagctaacagcagctaagccctgactttagttgagtattatttctcttcgaaaattgttgaaagtggaatagagagctttgcagctaaataatcattagactctactaaagctgggccaattttttccatccattcgtcatcatcatgaacatttgatacatcctgacgtaaaggtaatggataaggcagtgcagtgaagaagctccaaaagtcgacttgagataaattgcggaccaaaacatattcatctttatcggtacgtttaaccagattttgctcttctagtaagagaacataagcaggccaacgaccaacctcaccacgacctaaaatttctaatgcttctttatcacttacgctttcaccaagtttttgctttttatagaacaattccaagatgtcgagtagcattaaaaccggatgtcttttttgctctttgcctgaatgaaaagcggtaagagcaaaactcacctcgacaccaagcaatacaatattccaagataagaagacccataataggaaaataggtactgctgcaaacgcaccatatatgatttcataactggtgaaatttgacataacaaagctaaataaatttttgagtgtctcaaataatgcagcacttaagcatgcagcaattgctgctgcatataggggaactgtgcggttgggaatagtccaatataaaataaaaaaacctaaaattgtgagaacaaaagaaataagccagagtaaaaaggcgccatcaagttgataacctgtgaagttattgctcaataaattcatggaagcaacagttgatgaaataacaaatgcactgcctaaaataattggaccaagcgaaataatggtccagtaacgcataaagcctacaataccgctacgggtttcttttactcgccatattcggttaaaaacggtttcaattgaagtaagcattaaaactgttgtgacaaagaggaatagcacaccaattacagttaaattactggacttttcggtaaaagcattaagagctttatcaaaagcaatcgtacttttaggtaaaaaattactgtagattaagtgctgtaactgttgtctggcaggttccaatgccttaattgaagaaataataactaaaaataccgttaacataggtacaacggcaaaaagagtcgtataggtgagggagccggcttgttcacggcaacgatccgcttcaaaacgcttaattacgaataaaataaattgaaaccaggtcttgttataaaaaggaagcttcttcaaaaaacgttctaacatgcgtcatctatcccgatttttttaatcatgatgtgggtgattgatattcaccagtgtattcggttgagaacactatcgttgatgtgggtaaactttaacctaaagaataaaaaagtattctgaaagttctgtatgtatcatcgtaacaaaaggtagtaaaaagcttttaccgatatttgttactgtgcccttaaaaatcaatcacctctagaatttcataaaattggctacgccaaaaaaacaaaaaataccgtatagtgttctttttaacaaaattcgtgaaaccgatgcaaccttacattcttgtgctttattacagtaaatatggttcaactaaagaaatggcgcaccttattgcgaatggtgttgaatcggcaggtgtgaatgtaaaaattcgcacagtacctaatattgcaacagtggtaacagaagctgagccaagcattcctgaagaaggtgatatttattgtactttagaggaactggccaattgtgcaggcttagcgctagggtctccaactcgctttggtaatatggcaagcgaaatgaaatatttttgggatcagaccacaagcctttggttaaatggtgctttacataataagccagcatgcgtttttacttcttctggttcaatgcatggtgggcaagaaagtacgttattaacaatgttacctccattatttcatcacggtatgatgattttaggattaccaaactctattccggctttgtcgaatactaaaacaggtgggactccctatggcgcaagccacgtgagtggtccaagacatgatcaaagtttaagccaagatgaaaaaattttatgtgaagttcaagggaagcgtttaggcgaaatcgtaaaaaaacttcattcttaaatttatggcaataaaaaagagcgggtttccgctcttttttatttaaactattttattcttttacaaaagttactgtgccatcagcaagtgattgaacgcgcgctaatgactcaacgcggtaacctttttcaagtaataaatcacggcctggttggaatgatttttcaatcacaatacccacacctacaacttctgcatttgcttgatgaattaagtcaatcaaaccaagcgcagcttgaccatttgctaagaagtcatcaatcactaaggctttgtcgcttgagttgatgtgcttatttgaaatggcaatggtactttctgtctgtttagtgaaactaaacactttagcgcggtataaatcgtcttttaaagtaagcgattgatatttgcgagcaaaaatcacaggtacaccaagttctaaacctgccatgattgctggcgcaatacctgaagcttcaatggtaataatcttggtaatccctgcatctttaaagcgagcggcaaattctttaccaatctgctgcatgagtacagggtcaatttggtgatttaagaaagcgtcgactttcaacacttgatcagatagaacgataccttctgttaagattttctgttctagtgcgtgcacgggagaatcctctagacggatgctttttaaagcaaatgcgtattttaaaaagcatccgaaaaaatgcaagctttaattcgttttacctgtataacttgttaataacaaaccataagatgttttgccatcaatatgacttaccttgactggaaggtagtctaatttcggagctagccagaaaattgtgctgcgctcaggtttcttatgttgtaaaacaactttcacggtatcaaatgtgccataagaggttttaattttctcgttgccttgtttaacaaaacgacgattttcaacttcttttgcatcggctagagggtaagacgatttaagtgaaccattttttaaatcttcacgaatctgtaattctgcattcagctcatcaagtacacctgcttgccaagcgaatgagcgcgctttatcgtcttttttcgtgctaatagtcttattgccaggattaaaattaatactcattgtgttgttatggatcaaaattttactggtacgactaaagctttgtgaaccaattttaccgtttgcaaaactaaatttacttgtttcacttgcagaagcgattccacctgcttttgctgtgaattgataagtccaattattgccttgttgactcaatgcacgtgtcgctgaacccatacctttattattgtaggtaaactgataatttgcctgaaatgggctcatggcaagtgcgtggctagagaaacttgcaataagcaaagttgtcgaaataccagttgcgatgctgaatgatttcagaaattttgttgccataagtaaatatccttgtacagactgataggtcagtgctgatgcatctatgacttttgcatattatgcctgttgatcatggagaaataatcaggatttatgctaaatatgtaatctctttgtgttttttaacagtgaatttctttagttcgtaccgttgttatacatctttttgctgtattggcgtaatttcagtatctccaagttcatcttcagaatcatcatcttgatcacggaaaagtaaagcagccagattaacattaccaaagacaactaattctgcttcacgtactcgtgcatagttgatatgaaccttgcctaaggtttcaataatactggcctttttagcaaaccaacggttaaggtctaagaagatcaggtcatctttttcttgggctacatcaaatcgctccagaatcatgcctaatggatctttttttagaattttgtgatagtaaaaaatagccgcttttacagcaattttttgccagaaatttttatatttagcttctacaatttgtgtgttactaatttgctcaaaaacaataagttgttgttctttattaaattccatctggataagttttaagtcgaccgacaaagtggtctctaaacctttaacatgcattgtggcatagagtcttaaccagtcatgataaagatctgcatgtagatcatctaaaaactcgacattattagtcacgtagcgttctaaggtggcatttagaaaagtttgcgataatgtaaaatctctttcttcctcaatgaaggcttcagcttttcggtagactttatgaagacgtttgactaatgaggaaaatagcgtttgcataaaagaacttccagaagatgatttactaaagaatccacacaatctttattatgataaaaaacaggttttgatattgcagtgtaacaaatttaattgatacattttgacaaaatgaaaatggataaatatcaatatttgaagtgaatcacacttttatccatatttgaatatcagtttatgttttattcggtaataccgtggggaaaaggcatctatatgcttttaagattatgttgaaaagaagtctatccatagagcctttttattattggtggcaagaccgagtctttatcgctgcaataatattagcaatcttactgcatatttttgtgttgctcatccattttgcgatgcctgcgccgtcagaacaatcgactaaagaaattgcaatatcgattcgtcctactgaagatgtgatcaagcatgcagactttttagcccaagctgatcaacaaggttcaggggcttttcgggaagctcatcggatgtcgagtaactctccagcgcctatgccaagtgatgcttcaacaggagaagctcagctagaaactttagaaaaagtgcagcaacaaagagaacttaaatttgaagaaaaagtactcatgactgtattgagttggcagaaacaagcagaggagagccaaagaaaaaaagcacttgaacaattacaaagtcagtttcaggcaaaagctgccatggtagcgagtcttgaagctcagtatttacaacgtcagcaagattttagtcgccaacaaaagataaaaacagtagatggtattcaagccaagaaagatgcgtcagcagcttatctagataaatttcgtgaaaaagtagagctttatggcaaccgttattatccagaagaagcgaaacagcaacagttaaaaggtgaagttcgccttatggtaattttgaatgctcaagggggaattcgtgcaattcgtttgcttgaaagctcaggtcatccagttctagatgaagcagcaaaggcatcggtacggcgtggagcgccatttggccgttttgatgtaaatatgaaagatatttcagagcttcgtattattcgtacatggcgttttgatccagctgaagctgaatttgaagttcattaatgaaaaaatgtggataacttttaggatatccacatttttaaaatgtattaagaagctgactgcgttcttaatcgtgtgagagaatttgattattcctgatatgggttggcaatattgagtttagctaagatttcgatctctaaaccctccatttcttcagcatcttcatcacttgtttcatggtcataaccaagtaaatgtagaaccccatggactaaaagatgcgcaaaatgattttgtgcggttttcttttgttccagagcctcttgtaataccactggaatacaaattactaaatcacccaacggtaatgcgtcgagcattggtaaaacttcttcaggaatatcacttggaaaagatagaacgttagttggcttatctttctctcgatattgcaagttaagttgatggctttcttccaaatcaacacatgcgataccaatttcgcaatcttccttatagccaacgtggcgtaaagttgtctcaataatttttttgagttgagctcgtttgagctctaactcaggggattgaaagtcttgttgtaaacttaaactgattttcaaaatgaatccttaagcatcctgatgttgcaagtctgctgctgtatcgttttcagcaattaatgcttcttggcgtgctttacgttcagcacgtgcttcagcattaagacgctgttgttcaccatcccaaccctcataagcttcaacaattttttgaacaagttgatggcgtactacatcgcgggaatggaaacgggtaatatgaatttctttaatgttctcaagtacgcgaagggcgtgtgccaaaccagattgttggcctcgaggtaaatctacttgggtaatgtcacctgtaatcactgcacgagagccaaaacctaaacgggtcaagaacattttcatttgttctggtgtagtgttttgagcttcatccaaaatcacaaatgaatggttaagagtacgaccacgcatataagcaagtggtgcaacttcaatcacttgacgttcgattaacttggcgactttttcgaagcccagcatttcgtagagggcatcgtaaagaggacgtagatatgggtcgattttttgggttaaatcaccaggtaagaaaccgagcttttctcctgcctctaccgcagggcggacaagtaaaattcgctggatttcattacgttctaacatgtccactgcggcagcaactgctaaataagttttacctgtaccagcagggcctacaccaaaagaaatatcgctttgtaaaatacgttgtacatagcgtttttgattggcaccacgtggattaatgcgaccttttcgagtctggaaatagacatccatgggcgcatcatgctcatccatttcttcgccaactagttcgaagtttcgttcagtttgcgaagattgaatcaagaggtgtaacaggtcagcactgatttgttgggacgcctctgtttcttcgtagagtcgttgcaataacgcttcggctctcccaacagcatctatctcaccatctatgtaaaaaacatctccacgatgagtaattttgacatctaaacgctgttcaatttgcttaaggtgcccattataggcacccaagatgctctttaaacgttccattgaaatttcaggaaatgttacggtacgtcgaatcgctgcagtcaagagaaaacctttcagtagactttagaatacctctacattacgccacgtcaggctcaagattcaagagttcaccgtaaactaaatttaaagttttaatttcagtaatctcaatctctgcaaaacgaccaatccacgatgcatcgcctacaaaagtcactaaacgtgtattgtctgctgtacctactaaaatattagggtcttgatcagatactttttcaataagtacacgttcaattttgccaagcattgcgtcagttttttcaatgctagattgcttaatgacttgttgaacttgtgctaaacgttcttttttaacgtgttcaggggttgtatctggtaagtcagatgctggtgtacctgggcgttttgagtaaacaaagctataagaatgatcaaagtctaagtctttgataaattgcaatgtttctgcaaaattttcatctgtttcaccagggaaaccaatgataaaatcgctcgataaatgcatatcagggcgtattttgcgtaacttggcaatcttatcgatgtatacatcaatcgtgtgatttcgcttcattgctttgagtacatcattagatccactttgtactggcaaatgtaagtgtgaaaccatttgaggtaaatcttcataacactgaataagttcatcagagaactcaagtggatgtgaagttgtataacgtaaacggccaatacctggaatttctgcaacgagtcgtaacaattcagggaaggtacaaatgccgccttcgaatgtttcaccacgatatccgttcacattttgaccaagtaagctgatttcacggacacctttttcagcaagacctgcgatttctgcaagaacatcatcaagtggacgtgaaacttcttcaccacgagtgtatggaacaacacagaaagagcagtatttagagcaaccttccataatagaaacgaatgctttgaaaccttctacgcgtggttcaggtaagaagtcgaatttttcaatatcagggaatgaaatatcaacgagcttaattttttcttttttcggcttttccacttgtgcgtgatgttgatcaagcatttgcggtaaacggtgtaaggtttgtggaccaaaaatcatgtcgacataaggtgcacgtttttgaatattgtcaccctcttgagaagcaacacatccacccacaccaataacaagatcaggattttgttcttttaatttgcgccaacgacctaattcactaaatactttctcttgtgctttttcacgaatagagcaagtattcatgagcagaatgtctgcttcattagggttgttcgttaacacataaccatgagaatcccccaaaaggtctgccatacggtgactgtcatactcattcatctgacacccttgagtttcaatatatagtttctttattgaaacgtcagtggtgtgcgttggctgggtaacagtgttttctgaggcagctttggcaccattgggaatgaaggtttgaaccgtcatgcaggctcctaacagatcgatctagttaaataataaaatgacccaaaacgggtcaaaccaatcattatagcagtattttgagcagaacagataacaataaactcccataagctacacatgatttatggagacaaatgtcatgaattttaatgatgttgaatcagatagttacataacacaacaaaagaaagcatgaagaataattaaactatgcctaaaggtggatagtcaggatttaacgcatttatgagaccaggtaaaaagagctcatcaaacaagagtcgtgtgatgaaaaataaatatgcacatcgtagctggttaggagctgtgtgtttacttggttgttcattatcttatgccgcagaagaacaatttaacgatgcactaaatgccgccaatagtggtaatactgcattgttagatcaatatcagcttgcaatgcaaaatgatgtgttgggctactatcctgaatattggaaattaaacacaaatttaggctttcaatctccgacatcaattgtaagcttcgcacagcgctatccacagtctgctatggcagaaaagctggccgcggattatgtcgaagaaaaagttaaacaagctgactttgcgtctgcacaaccaatcttgccttatgtttcgaatcctgaccaggccgaaaattgtgctttagcgcaggtgagagctaaaagtggtgatgcattagtttttgctgaatataaagatgtatggttagccactgaatcgcaaccagaatcatgtattggactcggccgtatgatgctgtctagtccattaatgagtgcacaagacaagcagcagcgcctgtgggtacagttacgtgcaggtttatctggacaggcgcttgctacagcacagactttgggtttgaatttgtctttggctcagctcaatcagattcaggcgaatccactgaattacttatggtcagcaccaaaaaccaatgacgtagattacgcctatttgatttttgcactaggccgattagcaaataatgatttaggaaatgcttttgcaaatgtacagcgagtagcgcaaggtactccagagagcgtgcaaaagtatctctatcgaaccgtagcctatattggtggaactacggtaatgaagaacaactttaaccgtgaagtccttcaatattttgacgcaagttatggctatccgttaagtcctgaagaagctgaaatttatgcacgacaagctattcgttttagtgcatgggaaagtttaattcgtgcaattgatagtatgtcggtttcacaaaaacaagaagatcgctggcagtattggttagcgcgtgcgacagagcaacgtggcgatagtaattctaagaatacggcacaacgtatttataaaaaattagctgaaagtggggatgattatcacaaccttcttgcaaaagaccgtttaggcgtacgatataatcatcagccgtataatgatgagccaactgcaagtgatttacgccgtctagatcaaaatattcactttaatcgtgcatttactttaagacgaattaatgccaacccaacctatactaaccgagagtggaactgggctgttcgtcaagcatatctacagcatgatgatggattactattagcggcggcaaaacgtgctcatgatatgggatggtatgaccgcgcgatttatgcggcagatcgtacaacgaataaacataatgatacgtatcgttatgtgaccccgcataagaccaatgtcgtaagccatagttacaatgctggaattgatcctgcttgggcttatggtttaatgcgtcaagaaagccgatttgttacctcggcacgctctcatgtaggtgctggtggacttatgcaaattatgccggatacggcaaagttgattgctcgccagatgggagaaacatataatccggcagcgttaagtgaaatgaacaccaatattcgttatgggacattttatttatcgatgattcaagggcagttaagtaataaccctgttttagcaacggcaggttataatgctgggccgaatcgggcaagacgttggcaacctgattaccaaccgattgaggctgatcaatatacagaaaccattccattgcttgagaccagagattatgtcaagcatgtcatgacgaatgcgacgcattatggagtgatattaggtcaaggtgctcaatcattaatacaacgtatgaaagtcattccaacgcgatcatcaccttagttttagatgatgaatgatggaacattcttttaattggcataaccaagttttaattaaatgaaatatagagacctaggacttcaatcaatatcgcaacttgcatggtggatcatctgtgcaagcgttggtttgttgagttctgttttacatgcggaacctgttaacgtgcaaggttatgttatgcatgtacagatgacgcctgctgtttgtgcgttagatccttctaaacaaaagcagcgtaaatgtcttgaaggatattcgcttacgattactggtttaatgcctgaaaccaccagaactgactgttcaacacaaagctcagctacactgtcaccactgcaagctaaggtggtcgctcgggtgatgccagacaataatgctcgtgtgcaactctggagaagtgtgggtggctgtgtgcctatgaatgcaagtcaatatttccgtacgattattaactttgctgaacgtttaaaaatacctgctaatctaaccagctctactaatgtggaaatgcaacaatctacattacgtcaacaatttaccaagcttaatccaagcttacctcaaaatggtattcgcttcacttgtcagctctcacgctctgatgtcgtactaacagaagttaaagtctgttacacggtaaatggtcaatataagcaatgctcaaatcacgttgtctctaattgcccaagcgaaattactattaaaggcagttattaagagcaataaccatttcataaaaaaatgctgaccatacaatgaatctatttgtaaaggttaatttgtattttctatcagacttttggtgaaaatgagtcgcttttacatgcatctgccacttctttagagtacaatctttgccgtttatgatgatttggttaagtagaatcgctacttaacccgattaaggacactcattggagacaattacatgaagcaacccgttcgtgttgccgtgactggcgctgcaggtcaaattggttacagcttattattccgtatcgcaagcggtgaaatgctaggtaaagatcaacctgttattttacaattgcttgaagttccagttgaaaaagcacaacaagcgcttaaaggcgtaatgatggaacttgatgactgtgctttccctttattggctggcatgatcgggactgatgatcctaaagttgcatttaaagatgctgactatgcgttattggtaggttctcgtccacgtggtcctggtatggaacgtgctgacttgttaaaagttaacggcgaaatcttcattggccaaggtcaagcattaaacgaagttgctagccgtgacgttaaagtattagttgtaggtaaccctgcaaacacgaatgcttacattgcgatgaaatctgctccagatcttccagcgaaaaacttcacagcaatgttgcgtcttgaccacaaccgtgcgttgactcaagttgctcaaaaagctggtgttgctgtagctgacatcgaaaaattaacagtttggggtaaccactctccaactatgtatgctgactaccgttttgcaactgcaaatggtgaaagcttaaaagacaagatcaacgatccagcttggaacaaagacgtattccttccaactgttggtaaacgtggtgctgcgattatcgaagcgcgtggtttgtcttctgctgcttctgctgctaacgctgcaatcgaccatatgcgtgattgggcacttggtacgaacggcaagtgggtaactatgggtgttccttctgacggttcttatggtattcctgaaggcgttatgttcggtttccctgtaacaactgaaaacggtgaatacaaaatcgttcaaggtttagaaatcgatgaatttagccgtgagcgtatcaacttcactctaaacgagcttgaagaagaacgtgcagcaattgctgacatggtaaaataattcatcagtttgatgagttggaaagcactctcttgtagggtgcttttttatatgtgaaatttaataagaacacacaaaaaacaacaagaaaatataagcatagatatgcaactcacatctattgttgttagattattgaaaagaagccatgggagaataacaatgtttgaacaacaaccgacattacaacttttatttgagcaattgggtttagattctgatgatgcaagtattgaaaattttatcagaacgcatcaattgccggctgaacagaagttacatgaggcctctttctggtcccaaggccaaagtgattttttaaaaagtcattgggaaaaagatgatgagtggattgtagttattgatgagctgaatgagcaattacatgaagatagtgtgaaaaaataacaaatgaaaaaggcctgttatagttaacaggcctttttcattcataagttagtgagttcttaacttaattaaatttttataccatggttcatgacgtaccggattaaatataggatgttcatgaagcaactcaagatcacattgagcggttgataaatattttgtgagccaatgacgagttagtgcagactcttgctgtgctgctgacgcataagccaagaagaaatatatatcgccatgttgatgatgagctagaggtttcaaaatttgctgagcaatcagcgcaaagcgtttttccttatttaactcaaaataaagcatataagctttagctaaatgcagcgataggtttaaatacaaactcattggcatttcttcatattccatacgagcttgttccagcaaaacaatggcttcttgcaagaagtgaatttgttcttggcgaacacggcttaacgtaacgagctgcatacgtaattccgcacgctccaaagcaagctcgggcgtattctcagttaaatagagttggtctgtttcaccaattctggacacaatcgcttttgtttcaatagacatacgccttcgcctttttaatcaatatcttttatatcgggtccatttaagaaatttaaagagctttcttttaaacccaaattgagtttccgctacgaagccaagcagtaatagagaggcgctgctgtttagaaactaaaacctcatgaagcaaattgctctggaatataactaagcgattaggctctggtgtaataatgtgccaaatattgtttttatcttgtaagcgtaattggccaccccagtcatcttgccattcagggtgtaaataataaacggtagacataatacgatcatttttttgctgagggttatctcgatgtaatgcgtagaattcacccgggttataacaggcaaaatgtgcttctacttctttaatccctaaaaagaaagcttgatttagatgctggcaaaatgaagataatgtttctacatgctgctcagccacaggaagagattcgttaatccataaaatatgatcgcttcggatcgtactcaccacaccattttgaatacccgcttctcgaaactcatcaaagtggtggctacactctttggcaacttgagtatgatattcagcagaataagcttggttcacaattgcgaaaccatgagcatttaagtcatctaaaatctggtccagattccagcagtcaggaagcggttgagagtgcatataacctcatatcgatcgtaagaaaatcaagcagccttattttagatgatcacaaccttacgaaagaatatttttttcatgttaaactaatcgttgaattgaggaattaaagtcaacatgaattaccgtcaccatttccatgcgggcaactttgcagatgttatgaagcatgtgcttttgctacagcttctcaaccgtttaaatgctaaagataaaccttatcgttatatcgatacgcatggaggtgcaggaaaatatgatctatctcaggcacctgcacaaaagtcaggagaattcctaacaggtattcatcgtcttgtacagctttctgacatggaaaagcgccaagctcctgaagccatccagcaatacctaaaacttgtagaagaattacgtgctcaagaaggtaagggaagttatccgggctctccgtggtttgctttgcaaggtatgcgtgaaattgataaggctacaatatttgaaatgcagcgtgatgtatttcagcaattacgccataacattcatgataaacgtgcgggcttgcatgagcgtgatgcatatgaaggcttgcttgccgtaattccaccaaaggaaaagcgcggtttagtgatgattgatccgccttacgaattagagcgtaaggatttcccgcaattggttgaacttttacaaagcgcttataaaaaatggccaacaggtgtcttcgcggtttggtatccaattaaagatcgcgcaatgattgaacgttttgaaaagaaaatgtttaaaactggaattcgccgtcaattaatctgtgaaatttgtgtttggccagatgacacacctgtaggtttgaatggttgtggattattagtaattaacccaccttggcagttctccgaacaagcagatcaagccctacaatggttattccctcacttacgtatgcaagaaacaggtggtcatgccgctgtacgctggttagtgggtgagtaataattaatctaaatcaatgcacatgtttggaatagaaaataatgacaaatgcgcctaaaccagagcaagatttaactcataatgaacattcttttgatgggattacgttcgaagtggttgaagaagaagataatccggaaggacaaaaagtgaagcgcagaggtatttacctttggcctaacttaatcacgacagccgctttgttgtctggtttctattccattattgcaagtatgaatggcgaatttgctcaagcgatttatgccatttttcttgcagcattatttgatgggttagatggacgcgttgccagagctattggtgcccaaagtgcttttggtgagcaatatgactctttatcagatttgttagcatttggtgtagcgccagcaatgctaatgtatagctggagtctacatgacttaggccgtatcggtttggcatgctgttttgtttataccgcttgtgccgcgttccgtttagcacgatttaatgttcagattggagtggttgataagcgctattttattggtattgctagtccactcgccgcgattatcattatttcactcgtatgggtagctcgtgattatccgttcatttttgatttacgcgatattgctattcaaaccattaacgcggtcatcatggtggttgtaggactacttatgatttctaatattaaatattattcatttaagcaaatggatcgtaagcgtgttccttttgtagttatgttgccagtagtactgatttttgcagcaatcacttataatattccaatgggtattttgattgtatcaatcatctatgctctatcaggttttgttaccacacttttagctaaaaaaataacgagaccatcaaaacataaaattagatgaggttcggtatgcctaagttgataagtgaaaaaaatcaattacagcaactgagcctcaactcaaatgggggagttgtctatcagcccgccagaggtttttttaaagttgtctatcaaggtttaattcttcctaacctgcctgcaccacttcgttactttaattacattagtctaatcggtcagcctagaatccctctttgctataacgcaaatggtattgtgacttctgcagttgatacagcaactgtactggttagcaatagcttacatagtgtagggcacttaaaaacttattccattcgacgccaatgtcagcttaatcctagtcggtatcaattcgataaaactgatcttattgagtggcaaatcccaagagttcagcttagacgaatcgattctgaaatgagctgtgatttaatcgtccaaactccttccgacatttcgaattcatcagcattgcagtggggaatatctgactactggtctattttgtgccactgtgaaggtgagattttatataaaggacagaaatatgaggtcaatggattaggccgatttaaacatgctcgagccttacatttaccttttttatctttatgtttttatacctgtcaaattattaatttgaatgaaaccactcaagtcacactttctcaaataagaaatcagtggaatatcattctattttcacgtttagatattcaagaactaggaaagcagcccgtcacgtttacagaagatgttaatttccacatccaccgggtttatccaaaagttgaaacaccgcatgggcgagaaatgtatttaccacgagagttttcttggcaatgtaaaaaaaatggaaaagttatttttgaactctatggtgaaagtcgtggtgattacaaatttgggttagctgctggatacataggaagttttcgttatcaattaagttggaataatcaatgtcttcaaggagaaggtggatattgtgaatacattgattgccgacctttaagatggcaagaaaagaatcaaaacgaaaaaatgctcgataaattgctgcttttacaaccgtgtttatataaaaaatgaatatttttatcatttttgggtaaaaaacgaccgcttgatgtgagttgctagaaaaaggggttgcaaagggagagagatggtctataatgcacatccatcggcggtgatgtagatagaaacttgttgaaaaacagttacttgtgattaggttgattgctttaagtgatgaatttgatgatgagatggtttagagaataagttttaaaaatatttaaaattacctgttgacttttaagagattaagagtaatatagccgacctagcttgctggtgacgaaccagtaagaagatcattaagagaattgaagaacaacttgtgtggatttttactgattgattaatcgaaataattttcattgattgattggtttaaattactcgaagtttatttgagcgaaatttaagtcagtaattgatgagccagaattggcaccttgtctataaataaggtgcaaaatgattttaactgaagagtttgatcatggctcagattgaacgctggcggcaggcttaacacatgcaagtcgagcgggggaaggtagcttgctactggacctagcggcggacgggtgagtaatgcttaggaatctgcctattagtgggggacaacatctcgaaagggatgctaataccgcatacgtcctacgggagaaagcaggggatcttcggaccttgcgctaatagatgagcctaagtcggattagctagttggtggggtaaaggcctaccaaggcgacgatctgtagcgggtctgagaggatgatccgccacactgggactgagacacggcccagactcctacgggaggcagcagtggggaatattggacaatggggggaaccctgatccagccatgccgcgtgtgtgaagaaggccttatggttgtaaagcactttaagcgaggaggaggctactttagttaatacctagagatagtggacgttactcgcagaataagcaccggctaactctgtgccagcagccgcggtaatacagagggtgcgagcgttaatcggatttactgggcgtaaagcgtgcgtaggcggcttattaagtcggatgtgaaatccccgagcttaacttgggaattgcattcgatactggtgagctagagtatgggagaggatggtagaattccaggtgtagcggtgaaatgcgtagagatctggaggaataccgatggcgaaggcagccatctggcctaatactgacgctgaggtacgaaagcatggggagcaaacaggattagataccctggtagtccatgccgtaaacgatgtctactagccgttggggcctttgaggctttagtggcgcagctaacgcgataagtagaccgcctggggagtacggtcgcaagactaaaactcaaatgaattgacgggggcccgcacaagcggtggagcatgtggtttaattcgatgcaacgcgaagaaccttacctggccttgacatactagaaactttccagagatggattggtgccttcgggaatctagatacaggtgctgcatggctgtcgtcagctcgtgtcgtgagatgttgggttaagtcccgcaacgagcgcaacccttttccttacttgccagcatttcggatgggaactttaaggatactgccagtgacaaactggaggaaggcggggacgacgtcaagtcatcatggcccttacggccagggctacacacgtgctacaatggtcggtacaaagggttgctacacagcgatgtgatgctaatctcaaaaagccgatcgtagtccggattggagtctgcaactcgactccatgaagtcggaatcgctagtaatcgcggatcagaatgccgcggtgaatacgttcccgggccttgtacacaccgcccgtcacaccatgggagtttgttgcaccagaagtagctagcctaactgcaaagagggcggttaccacggtgtggccgatgactggggtgaagtcgtaacaaggtagccgtaggggaacctgcggctggatcacctccttaacgaaagattgacgattggtaagaatccacaacaagttgttcttcatagatgtatctgagggtctgtagctcagttggttagagcacacgcttgataagcgtggggtcacaagttcaagtcttgtcagacccaccatgactttgactggttgaagttatagataaaagatacatgattgatgatgtaagctggggacttagcttagttggtagagcgcctgctttgcacgcaggaggtcaggagttcgactctcctagtctccaccagaacttaagataagttcggattacagaaattagtaaataaagattaagatcttggtttattaacttctgtgatttcattatcacggtaattagtgtgatctgacgaagacacattaactcattaacagattggcaaaattgagtctgaaataaattgttcactcaagagtttaggttaagcaattaatctagatgaattgagaactagcaaattaactgaatcaagcgttttggtatgtgaatttagattgaagctgtacagtgcttaagtgcacagtgctctaaactgaaatgttgaagttactaacttgtaggtaacatcgactgtttggggttgtatagtcaagtaattaagtgcatgtggtggatgccttggcagtcagaggcgatgaaagacgtgatagcctgcgaaaagctccggggaggcggcaaatatcctttgatccggagatgtctgaatgggggaacccacctactttaaggtaggtattgcaacatgaatacatagtgttgcaaggcgaacgaggggaagtgaaacatctcagtacccttaggaaaagaaatcaattgagattccctcagtagcggcgagcgaacggggatcagcccattaagttatgtgtgttttagtggaacgctctgggaagtgcgaacgtagagggtgatattcccgtacacgaaagggcacacataatgatgacgagtagggcgaggcacgtgaaaccttgtctgaatatggggggaccatcctccaaggctaaatactcctgactgaccgatagtgaaccagtaccgtgagggaaaggcgaaaagaacccctgtgaggggagtgaaatagatcctgaaaccgcatgcatacaagcagtgggagcaccttcgtggtgtgactgcgtaccttttgtataatgggtcagcgacttatattcagtagcgaggttaaccgtataggggagccgtagagaaatcgagtcttaatagggcgtttagttgctgggtatagacccgaaaccaggcgatctatccatgagcaggttgaaggttgggtaacactaactggaggaccgaacccactgtcgttgaaaagccaggggatgacttgtggataggggtgaaaggctaatcaagcctggtgatagctggttctccccgaaagctatttaggtagcgcctcggacgaataccatagggggtagagcactgtttcggctagggggtcatcccgacttaccaaaccgatgcaaactccgaatacctatgagtactatccgggagacagactgcgggtgctaacgtccgtagtcaagaggaaaacaatccagaccgccagctaaggccccaaaatcatagttaagtgggaaacgatgtgggaaggcatagacagctaggaggttggcttagaagcagccaccctttaaagaaagcgtaatagctcactagtcgagtcggcctgcgcggaagatgtaacggggctaaaactatgtgccgaagctgcggatgtatactttgtatacgtggtaggggagcgttctgtaagccgatgaaggtgtgttgagaagcatgctggaggtatcagaagtgcgaatgctgacgtgagtaacgacaaaacgggtgaaaaacccgttcgccgaaagaccaagggttccagtccaacgttaatcggggctgggtgagtcgacccctaaggcgaggccgaaaggcgtagtcgatgggaaaatggttaatattccattacttctgtgtaatgcgatgagaggacggagaaggctaaatcagcctggcgttggttgtccaggtgaaaggatgtaggcatgtatcttaggcaaatccggggtactctatgctgagatctgatagcaagctgtacttgtacagcgaagtggttgatgccatgcttccaggaaaagtctctaagcttcagttacacaggaatcgtacccgaaaccgacacaggtggtcaggtcgagtagaccaaggcgcttgagagaactctgctgaaggaactaggcaaaatggtaccgtaacttcgggagaaggtacgctgttgttggtgatggaactcgcttcctgagctgacgacagccgcagaaaccaggccgctgcaactgtttattaaaaacatagcactctgcaaacacgaaagtggacgtatagggtgtgatgcctgcccggtgctggaaggttaattgatggggttagcgtaagcgaagctcttgatcgaagccccagtaaacggcggccgtaactataacggtcctaaggtagcgaaattccttgtcgggtaagttccgacctgcacgaatggcataatgatggcggcgctgtctccagcagaggctcagtgaaatcgaaatcgctgtgaagatgcagtgtacccgcggctagacggaaagaccccgtgaacctttactgcagcttgacactgaactttgaccttacttgtgtaggataggtgggaggctttgaagctggaacgctagttccagtggagccgtccttgaaataccaccctggtaatgttgaggttctaactctgtcccgtgatccgggacgaggaccgtgtctggtgggtagtttgactggggcggtctcctcctaaagagtaacggaggagtacgaaggtgcgctcagcgtggtcggaaatcacgcgtagagtataaaggcaaaagcgcgcttaactgcgagacccacaagtcgagcaggtacgaaagtaggtcttagtgatccggtggttctgtatggaagggccatcgctcaacggataaaaggtactctggggataacaggctgataccgcccaagagttcatatcgacggcggtgtttggcacctcgatgtcggctcatctcatcctggggctgaagcaggtcccaagggtatggctgttcgccatttaaagaggtacgcgagctgggtttagaacgtcgtgagacagttcggtccctatctaccgtgggcgctggaaatttgagaggatctgctcctagtacgagaggaccagagtggacgaacctctggtgtaccggttgtgacgccagtcgcatcgccgggtagctatgttcggaagggataaccgctgaaagcatctaagcgggaagcctacctcaagataagatttccctaggactttatgtcctctaaagagccgttcgagactaggacgttgataggttggatgtggaagcatagtgatatgtgaagctgaccaatactaattgctcgtgaggcttgactatacaacacccaagcagttgtatatgaagcatcaatcgattcttaagtatgcaagacaacttgatttagttatacctctagctaaaatgaacagataaagtaagattcaattcagcccagtctgttacagatttggaaaacgcttcggcattaaataagacctaagcaagtatccataaacagttgtgctggcgaccatagcaagagtgaaccacctgatcccttcccgaactcagaagtgaaacctcttagcgctgatggtagtgtgggattacccatgtgagagtaagtcatcgccagctcattattctaaacaccccaatctcaaaagaggttggggtgtttttttatagcaagaaatcaatcaatttttatagctggaatttgtatcctcaatcctttaaactttaaaattgattcaaattataaagaaataaagctaatctaaagttatttacctcatcaaaaatttaatatgcaatggatcgtagttaaaactttctcgtttccttatgaggcacaaattgcaaaaactcaattagaagcatttggaattcctgcttatattgaaaatgagcatacaattaatatggattggttttattctaatgctttaggtggagttcgtttattagttccagaaaactatgttgatgaagcgaagttatttcttgaaaaagactttagtgatgagcttgaacaaaagttcggggagaataaagaatattgtcctgagtgtggaagtttggatatagaggttaatactaaaggaaaaaaatctgcctttttagtgtttatgtttttcggcctacctttattttcttttaaaaatgggagtaaatgtaagcgttgtggacacttttggaattaaatatatagtaaaggattatttattatcttaattatgaaccctcatgtagagagattggattgagttctatctctgcaattaatgtttgaggcagagaagccctcgatattaaacaaagaaaataaattattttgatgggcgttctgtttaataactataaggtgtattcaatgatgactaaaaaacaattgacttcaaaacaaatagatatgttgcttgaattattaaaaaatagatttgaaaagaatatacatcgacataaagaaattgattggacgaatgtgcgagctaaacttattgagtctccagataaactatggacattgcaagaaatggagaatactgggggagagccagacgttgtagcgtataacaagcaaaaagatgaatatttattcgtcgattgttctgctgaaacccctcaaggtcgtagaagcctttgctatgaccgagaagccttagagtctagaaaagatcatcctcctaaaaatagcgcaatagacttagtccaagaaataggggctgaactcctaacagaagagcaatatcaccaattacaacagctcggggagtttgatctaaaaacatcaagctggcttgctactccagaggaaattcgaaaattaggaggagctctttttgcggaccgtcgctatggtcgagtcttcatctatcacaatggagcccagtcatattatgcagctcgtggttttcgctgctgtttaagggtataggtcttgcgaatcaactcgatcgtctggatttgatattttatgccaagaaaatggagattcttgcaacttttgactgatggtaaacatgacaagatatgttctggaattaaataaaaacatcaggacatttctaaaaatgcagctcaatccaatttactataatgaacaacatatagcttttgccgataatgttcgtagatttgtacaaaaagaaatgacacctttcgttaatgaatgggatgaggctgagacattcccaagagaactttataaaaaggctgccgaaattggattattgggtctaggtttttcagaagaatatggtggtattccagatgcagatccattctattcattactggctggtatcgaaatggcaaaggcgggttcaggtggggtgcatatctcgctcatggtccataccattggcgcccctcccattcagcactttgggagtgaggagttaaaggctagagttctgccaggtattatttccggtgagaaaatttcggctttagcgattacagaacctggtggcggttcagatgttgctgcattacagactaaagctgtcagagatggggattattatattgtttcgggcgagaaaacatttattacatcgggaattcgtgcagactattatacagttgcagtgcgtactgatccgacaaaaacgggtgcagaaggcatttcaatgttactcattgatgcacatagtgaaggtattactaaaacgcctttgaagaaaatgggatggtgggcatcagatacggcacatttgcattttgatcaagtacgagtacctgcatcaaatctacttggcaaagaaaatgccggttttaaagttattatgaataactttaatatggagcggtttttcttgggagtagtcgcttatgggtatgcattagtctgttatgaagaagctttagagtgggcacagcaacgtaaaacttttggtaagcgattaatagatcatcaagtagtacgccataaattggtagatatggcaacccaactgacctcaacgcgggcattacttgaagaaacagcatggaaaatgactcagccgaagttacaaggacctgagttggtggtgcaaatttcaatgcttaaaaatgttgcgactcgcactatgcaattttgtgctgatgcggctgtacaaacattaggtggtatgggctttatgcgaggtaccaagtcagaacgtatttaccgtgaagtgaaggtcaatatgattggcggtggtgctgaagaaattatgaaagatttgattagtaaacagcttggttattaattcttataaggtggactttgagccaccttttttatttcaaagccatttcccaaaccatttccgttaactcatcaattttgactttaccctcagatttataccaagttacagtccatgaaattgcaccgccaattaagcgtcgccaaataaaagcatcgtgtttgactttaccttgtgtgcgtaacttttcaatgatatcgagccagatttgctcatattcattacgcatttttaaaagataatcttgcttttcttttgatagagcgaaccattcgtacaccaacacagccatggctgcaccagtatctccagtaattgagatcagttcggctttaataagagcacgtaattgttgttctgggtctgtagattgagttgctgcatcatttaaacgggcaagattatagataatggtctgttccatcacatgagcgaggatatcatctttacttttgaaatgatgaaataagcttcccgattggattccaataaactgagcaagttcacgaacagtggttttatcatagccttgcttatgaaaaagataggcagcaccgtgcaataaacggccacgtggactgtcatcaaagcaggggatatttggaatctgttcaattgaggtggcaatcatgtgctcagtttgttcctttatctaaaagtctatagtggaaattttcactaaatttcattgcatttcaggttatttgctgaatttggaagatttggtcaacatcacaataacattttgcgctttacaaaccaagcgcttgcttggtaatgttgaggctgatttttagacaaaataatgagaaatagaatggcaaataatcagcaggatgatcatcgagtcgtaaaaataggttgtgcctctgggttttggggagataccaatactgccgcttttcagttagtgcatttgaccgatattaattatttggtttttgattatttgtccgagattaccatgtcgattatggcaaaagcgaagatggtagaaccgaaacatggttacgctttagattttgtcagccgagtcatggcacccttactaaaaaaaattgctgaaaaaaagattaaagtgattagtaatgcgggtggtgttaatccattggcttgtcgggacgcattgcaaaaaattattaaagagtatggtctagatctgaaagtggctgtggtgttaggtgatgatcttttgccaaaacatgagcagctaaaatcacagaatattcaagaaatgtttagcggagaagcgttgccagaacaggtggcaagcagtaatgcttatttaggcgcggttgctattcgtgacgccttagacttaggtgcagatattgtgattacgggtcgtgtagttgactctgctgtggtacttgcacccttacttcatgaatatcagtggcctttagatgactatgacaaattggcacaaggttcgttggcaggtcatgtaattgaatgtggagcccaatgtacgggtggtaattttaccgattggcaattggtacagggcttcgacaacatgggctttccagtggttgaagtgagtgaagatggctcatttgttgtaactaagcctcaaggtacaggtggtctggtttctactgctacagttgcagagcaaattgtttatgaaataggcaatcctcaagcatatttactacccgatgtcattgctgatttcagccacgtgcatttagagcaagtcggggaacaccgagttcgtgtgacgggtgcaaaaggacaagcaccaactacacaatataaagtcagcgcgacttacccagatggatatcgggttttagtgagtttcctcattgcaggacgtgaggcaccacaaaaagcacaagtcattgctgatgcgattttgactaagtgcgaacgtgttttagcaatgcgctcagtgccgccatttagtgaaaagtctgttgaaattttaggtattgaaagtacctatggcgaccatgcccaaacattaaatagtcgtgaagttgtggtcaaaatagctgtaaaacacatgtttaaagaagcatgtatgttctttgcatctgaaattgcacaagcttcaacaggtatggctccagccttggcaggaattgttggaggccgacccaaagcatctccagtgatcaaattattttcatttttaattgataaaaatcaggtgaatgttgaaatcgattttgatggccaacgtcacgcggttgaaattccacaaggggtttctacagagcaattgcttacattgacggcaggtgaaaatgcagtttatcaaggagatgaaattgaagttcccttgattgaaattgcgcatgcccgcagtggtgataaaggcaatcatagcaatattggcgtgattgcacgtaaagcagactatttaccatggattcgtgcagcactaactgaacagtctgttgcaagctatatgcaacatgtcttggatgctgagaaagggcgagtaatccgttatgagttaccgggtttaaatgcactgaattttatgttggagaatgccttaggcggtggtggtgttgccagcttacgtattgatccgcaaggtaaagcttttgcccaacagttattggatatgcctgttaaagttccggcacatcttttagaaaaataaaatgaatggatgaaacaaagatgagttatcaatcaatatttagaccagatgctttcgccaataaagtcattattgtaacaggtggcggctccggaattgggcgctgtactgcacatgagcttgcagcccttggcgctcaagtagtgattacaggacgcaaaattgaaaaattagagaaagtaagccaagaaataatagaagatggtggtttagttcatttcattgtttgtgataaccgtgaagaagaacaagtgaaaaatatgattgccgaagtgattgagaaattcggcaaactcgatggtttggtaaataatgcaggcgggcagtttccctcagctttagagaatatttcggcgaatggtttcgatgcagtcgtgcgtaataatttacacgcaactttctatttaatgcgtgaagcttataaccaatggatggttaaacatggtggcagtattgtcaatatgactgctgatatgtggggcggcatgccgggaatgggacattctggtgctgcgcgttcaggggttgataacttaactaaaacagcatcggttgagtggggcaaatctggtgttcgtgtaaatgcggttgcaccggggtggattgtatcatccggtatggataattatagcggtgattttgccaaagtgattattccaagccttgctggaaatgttccattaaaacgtatgggaacagagtctgaagtttcatcggcgatttgttatttactctcggatgccgcagcttttgtgtccggtgtaactttgcgtattgatggtgctgcatcgcaagggacacgcatgtatccactgggtgaggcgacaaatagtgaatcttataatggtttccatcgcgcgtttattcctgaaatctttcagaaaaagactgaggctgaggaggagtaacaatgacaattcttccatcagagatcgctgttggtagtgaacagtatcaaaggaacaaagaggctttacttgcccagttaagtgaagtccgcgctattcaacaaaaaagcattgataaatcttatgctgccaaagcgaagtttgacaagaaaggcaagattttaccgcatgagcgtgtacggttattgctcgatgctgattcgccttttatcgaactatgcggtttggttggctacaacatgcatgatgataaagatggctccgaagctggtggtggcgtaattgctggcattggttttgtcagtggtgtgcgctgcttggtctcagccagtaatagtgcaatcaagggcggtaccatgtcacctatgggtgtacagaaaaccttgcgcttgcaaaaaattgctttagaacaaaaacttccaatgattacgctgacggaaagtggcggcgccaacttaaattatgctgcagaagtatttacctatggtggtatgacctttgccaatcaggcacgtttgtctgcggcaggtattccacaacttgcagtggtacatgggaatgcaacggcaggaggagcttatcaaccaggtctttcggactatgtgattgctgtacgtaaacagactgaaatgttacttgcaggcccacctttacttctggctgccacgggtgaagtcgccacagcggaggaattgggtggggctgaaatgcatgcacaggttgctggaacagcagaatacttagcagaaaatgatgccgatgggattcgacttgcgcgtgaaatttttgaacacctgaactggaaagagcaaaacaaaccagttgatgtgacttataaagagcctcgttacgataccgaggaactgttgggtgttattccaagtgatcctaaacaaccatttgatatgaaagaagtggttgcccgcattattgacgattcagattttctagaatttaagctggaatatgatgatttaacggtatgtggctgggcaaaaattggtggtttgcatatcggtattattaccaataatggtccgattacccctcaaggagcagcgaaagcagctcagtttattcacttatgtgaacagaccaaccgtccgttattattcttacataacactactggctttatggtgggaaccgatgccgagcaaaatggcattattaagcatggctcaaaactgattcaagcggttgccaattgtactgtacctaaaatttcaatcgttgtggcagggtcatatggtgctggtaactacgcaatgtgtggtcggagtttatcgccagattttatttttgcttggccgaactcgcatgttgctgtaatgggggctgcacaggccggaaaggtgctacgcattgtggctgaaggaaaacaaaaagcttccggtcaggaaccgaatccgcaaatgctcgattttcttgagcaaagtacggccatgaaattagagcagcaatctaccgcgcttttcaatacggccatgctacatgacgacggcattattgacccgcgagatacccgaaaattacttattttccttttacaaaccatttatgaagcacagcaacgcgaactaaatccgacccgttttggtgtgtctcgtttttaatcaatctttaccgtaattaaaaaaattaataggaacaacaccatgaaatttactgccgaacatgaagcattacgtcgcacagcgcgtcaatttgttgaaaatgaactgaatccgaatattccagaatgggaagaagctggacgtttcccgatccacgatgtatttaaaaagatgggtgatcttggcctattggggatttgtaagcctgaggaaaatggtggtctggctttagattactcttataacttggttgtggctgaagaaattggacgcgcagcttgcggtggtgtgcctttagccattggtgtacaaaccgatatggcaacacctgctttggcgcgttttggtagcaaagaattacgtgatgagtttttaacaccagccattgctggagaatatgttgcctcaattgcagtatcagaagtgcatgctggttcggatgttgctgctattaaaacgactgctaaaaaagatggcgatgactatgtcattaacggcagcaagatgtggattaccaactcactgcaggctgatttcttctgcctattggccaacacatctgacgataaacctcacgtcaacaagtcgatgattattgtgccagcaaaaactaaagggattagtttttcagaaccgttaaataaattaggcatgcgttcaacgaccacagcacaagtttatttggacaatgtacgtgtacctcagcgtaatttggttggcgttgaaggtatgggcttcatgatgcagatgatgcaatttcaggaagagcgtttatgggcttgtgctaatgcgattggtggtttggaaaatttaattcaaaagactatcgcctataccaaagagcgtacgacgtttggtcaaccactcattaataaccaatatatccattttcgttttgccgaactcatgactgaagtagaagcgcttaaagctttaacctaccaagcgtgtgaacagcatattgcgggtgaagatgtgactaagctggcatctatggcaaagctcaaagcaggccgtttaagccgtgaagttgccgatagctgcttgcaatattggggcggcaatggctttatgtgggataaccctgcatcccagctatatcgtgatggtcgtttaggctctattgggggtggcgcagatgagattatgttagggattatctgtaagttgatggatatcttgccaaaaaaacaaaaataaggaatcagccatgacactttcagcatcgcttcaagctttagatattgatgacagtattcaattagaacaagacggcagtattttatatctttggttaaaccgaccggagagccgtaatgccatgaacttgaatatggtcaatgcgattcaacaagtttttactgccattcgcaatgatctttcaattcgtgcagtcatcattcgtggtgaaggtgggactttctgcgcaggtggtgatattaaggacatggctgctttacgcgttgaatcaactaacattggtagtctacaaccttatactgactttaaccgccgttttggtgccatgcttgagcaagttgaagctgcaccacagactgttgtggtcattttagaaggtgcggtgttaggtggaggttttgggctggcctgtgtttctgatgttgccattagccgtgataatgcgcagtttggtttacctgaaactgggcttggtgtgattcctgctcaaattgctccttttgtggtgaaacgtattggcctgactcaggcacgcagactggctttactcggcatgcgttttgaagggcataccgcactgagtgtcggtgtggttcatcaaattgcacataatgaaattgaacttgaacaagctttacaggaaaccattcaacacattaaacgagcagctcctcaagcttcacgtgtgactaaagcactgttacatcgaacactcaatgaacctttaaatgagttgctagatgatgctgcacagcagtttgctcaagcggttggtggtgctgaaggacaagaaggaacgatggcttttatccagaaaaggttaccaaattgggccgatggatcataaaagataaggataaaaataatgaaattttcaaaaatactggttgccaatcgtggtgaaattgcagttcgagttatgcaaacagccaaggcaatgggttaccaaaccttcgcagtttattccgatgcagaccgtaatgctcgccatgtgcaagaggctgatgaagctgtttatattggtgcttcaaaagtatcggagtcttatctctccatcgctaaaattattgaagcttgcaaaaaaacaggggcggatgcagttcaccccggctatggttttttgtcagaaaatactgattttgctcaggcatgtatcgacaaccagattacatttattgggcctaccgcttctgcaattgagttaatgggcagtaaacgcctttcaaaaatcgccatgattgaggcaggcgtcccttgtgtgccggggtatgaaggtgaccgacaagatctcgaatatttagcaactcaagctgagcagattggttttccaattatggtcaaagcttctgcaggtggcggcggtcgtggcatgcgtttggtacagcaagcatccgagttgtttgaggcattacaaaccgcacgttcagaagctgaaaatgcttttggttctggtgagctcattttagaaaaagcagttattgctccacgccatgtcgaaattcaggtttttggtgatacacatggtaattatgtgtatttgtttgagcgcgattgttcaatccagcgccgtcatcagaaggttgttgaagaagctccctgtccggtgatgacgcctgaactgcgtcagaaaatgggtgaggcagccgtagcagcggcaaaagcatgtgcttatgtcggggcaggtacagttgagtttttgctagatgcatcgggtgcattttactttttggagatgaatacccgtttgcaggtagaacatccggtcactgagcttattacagggttagatttagttgaatggcagttacgtgtggcgaatggtgagcagttacctttaaagcaacaggaattgaccttaaatggtcatgcgatcgaagtgcgtttgtatgcagaagaccctcgtcaggactttttgccacaaacaggacaaattttacgttggaagcctgcagctttgccaaatgtgcgaatcgatcatggcatgttagcaactgatgaagttagtccattttacgatccgatggtagcaaaggtgattgcctatgggaaaacccgtgaggatgcgattcgcttactggctcgtgcagtcgatgatagtgttttacttggagtgaatagtaataaacagttcttggtcaatttactgcgccatccagttgttgttacaggggataccaatactgcattcatccaacagcatttccaaaatgatcccagcttacaccatcaggttttatctttagaaaccttagcaattgctgcggcattatttagccaaagtaaaggtactgcagtgtggcaaactgggcttggtgtgccattaccgttaaaattacaaactgccgatcagcaaattcaattgcagctttcatctgtaaataacatattcacggtacagttctgtgatcaaacagttgttattgatgtgcttgagaaaacgccagagcaactagtttacttaattgatggtgtacgtcgccgtgttcaatatgtattggatgatgatcagctttatctagatcgagataatggcaatgttttgatacgcaatatgacttacgctgcaccagaagctaccgatgtagcgggagatggcaaaattcgagcaccgatggatggggctgtagtgaatatcctggtcaatgaaggcgatcaagtagtgaagggccaaacattattgattcttgaagccatgaaaattcagcaacagattaaatctgatgtggatggtgtagtcgctgaaattttaggtcagcaaggtcaacaagtgaaaaaacggcaaatgctgtttagtatccaaatttaagagaagagcaattgtggttactggtaatcactattgatttatagaagatgattatttaaatcaaaaaagggaacatacgttccctttaattataaaaaaaaattatacaagctgtgtatacatacaatagagatagcctaaaatagctaaagcaacaagaggagcgataacttttgaccatgcaggaataaaagtttcgataggttgctcttcaacatgtaaatcttcatgatgtggttgggcttggtgaaccatttggttgaactccttcattgttgcatccaatgatagctcttcttgttcaacaggtttagaaccaatgagctctgttagatggtttgttgaccaaacccaatcttcagcttggccagataaatgttcaacttgccctaaaatgagctcttttaaaccactttggccgaaaccaccagtctcatcaagttgattaagttctgttaactgtaatgccagaatctcagaaatactttgctcaagttcagaattttttaaaactgacttattgtgttttgacgtagttagatgacgtgcaacttcttgaatatacaatggatcggcagttttgatttcatgataaattttattgtcgtcctgacgccataagctgattaatttaccaagcgtcaatatattcacttcgtcaatcagcttatttttctcattggctggatattgatttaaaagctgaggcttttgaatttttatttgctcagcaaagtattggactaaatcaaatgccatactttattcctctaaaattaatctaaaattcttaatgttggctttttcttggttggttcagatgtttcttgtgtttctgagtctaacttatcttctacaggcgctacattggcatattcttcagggtcaaagaataaaccttgtccattttcacgtgcataaatacctaaaactgcttgaataggtacgtaaatatctttggaaacgccgccaaaacgtgctgaaaatgtaatcgcatcattgctaatgagtagttgatgtaccgcatgaggcacaatgtttaaaacaatttgtccatctttcacaaactgttgtggtacatcagtgtgcggttgtgttgcatcaacgagtaaataaggtgtgagttgattgtcacaaatccattcatagattgcacgagcaagataaggacgtgtaggggttaattcaatagtttgctcagacatatcacactattccatatttaatagttcattgtaacgggttttctcttggggcgtcattgatttaacaaaagaagggcggttaaagatacgtttacaatacaaaaatataggtcgacactgctgctttggtaaatcaattcccatgctattaagcctcacaaaaattggagcaagcatacagtccagaattgaaaaattttcggacataaaataagggaaatgctgaaataaaggggtaagtgatattaaggtatcacgcaattctttttgtgctttttgtttttgttctacatttaacgtatctgcatgtctgagcatatgatcggccaacttaaaccaatcattttcaagacgccaaatatattggcgttgctctgcacgtgccataggggcatcggcatatagtttattctgacgatatcggtcatcgagatactcagcaataataggtgctgaaaataatttaagattttgctcaaccagcattggcaattgattataaggatttaagcttgccagatcttcatcttcgtgatcagttacgattaattgatatttaatttgtttttctgccaataaaaaacggatccagtgtgaacggaaatcatcagcatggctgtaaagggtaattccctgaattgaggtgttttcgaccgacatatcacaaggtatggttgtgtgaatcggttagaatactaaaaatatgcgaggaaatcacggtgacaaagatagagtttcatatatttatctgtttcactcatctacaaaatgaataagcaataaaaaagccttgggaaaaccaaggctttttgtccgattcggtaaacgaattaacgtttagagaattgaggacgtttacgagctttacgtaaaccaagtttcttacgttcaacttcacgagcatcacgagtaacgaaaccagcttgacgaagaacaggttttaaagtttcgtcagcagcgataagtgcacgagtaataccgtgacggatcgcaccagcttgaccaccgataccaccacctttaacagtgatgtaaaggtcatatttttcagtagcttctaaaagctctaaaggttgacgaacaaccatacgagcagtttcacgaccgaaatattgctctaaagtacggttgttaataacgagtttacctgtaccagctgacaagaaaacacgtgcagttgcggtcttacggcgacctgtaccataattagtagccatgtgctgtatcccttagatgtccaaaacttgtggctgttgagcagcgtgtggatgctcgctaccagcgtacactttcatcttcttgatcattgcataaccaagaggaccttttggcaacatgcctttaacagcacgttcaaagatttcttcaggtttgtgagcaactaatttttcgaaattagtttcttttaaaccgcctgggaattcagtgtggcgatagtatttcttgtcaagcgctttgttaccagtcacttgaacttgttcagcattgataacgatgatgtagtcaccagtgtcaacgtgaggagtataagaagttttgtgcttaccgcgtaaacgacgtgcaatttcagtcgctaaacgaccaagagttttacctgtagcatcaacaacgaaccaatcgtgttgtacttcagcaggctttgcgctgagagttttcattcaaacactacctattatagttggtttgagctagacatcgctcaaacaaaaaggagacgagattctaaacgagtttgttgtcaatcacaagaaaaatcccatataagctacataattttatccctaatccgatgaatgtaggatatgttaaaataattcaaattttagagatgtgtcgggggtgattgtgctgcctttatatgtcacttccggtgaacctgccggtattggtccagatatttgtttgagtctggcaaaacgggttgatgaacgtcctgttgtggttttggctgatcgaaatctattacaacaacgcgctcaaaagcttggtctggacattaaatttttagagtatagcggacaagctgaatcgtctttgcaaggcgagctttatatagaacatgtacccctagaaactatagtcgttgatggacagcttaatgctgctaatgccgcttatgtattagagcaattacgtcgctcagctgattatgctatgtctggtaagagcgtcggtgtagccactgctcctgttcaaaagtcggtgattaatgatgcagggattttatttagtggacatactgaatattatcaagaatttgcaggtgtagagcgtgttgttatgatgctggcaacgaaaacgttgcgggtggctctggcgaccactcatttaccattaagagatgttgcagatgcaattaccaaagaacgcttgcatcaagtgattgatattttacttcacgacttaaagaccaaatttaaaattaatgatcctcgagtcttagtatgtgggttaaatcctcatgcaggcgaagatggttatttgggacgtgaagagattgatacggtcaatccggtacttgaaagctaccgatcacagggagttaaattaagtttaagtttgccagctgatactttatttacgcccgaacatcttaaaaatgctgacgctgttcttgcgatgtaccatgatcaaggcttacctgtgttaaaatcacaaggttttggtgaagccatcaatatcacattgggcttaccatttattcgaacttcggtcgatcatggtactgctctgtctttagctgggacaggattggcaaaaagctcaagtttaaatgtcgctgtcgatttagctttatctttggcagcgagttaaatttttcatgttggaaatgttctatgtatcaaattaatgccctaaacccgaaagatgaagggcataaagctcgtaaacgttttggtcaaaacttcttacatgatcaacgagtcattgccaaaattgtacgctcagtcaatccgcgtacgggtgataatatcgtcgaaattggtccaggtttagctgctttaacttctcctctaattggagaatgtgatgcattaactgtagttgaattagaccgtgatttagctgctggcttacctgaacgcgtgccacatccagaacgtttaactatcgtagaagctgatgcattaaaatatgattttagtcagcttgtaaaagatgggcgtccattacgcgttgtcggcaatttgccttataacatttctacaccattactttttcatctcttggaatttggtagccaagttaaagacatgcacttcatgttgcaaaaagaagtggtagaacgtattactgctgaaccgaatacaaaagaatatggccgtttatcagtcatgatccaatattattgtcagcctacctttttatttgaagttccagcaggcgcatttaacccgccaccaaaagtgacaagtgcagtatttcgcttggttccttacgaacaaaaaccaattacggcgaaagatgaaaaagctttagctcgcttggttgcccacgtctttactcagcgccgtaaaacgctaagaaacagtcttaaaggcatgttggcagaggatggtttcgagaaagcaggagtcgacccaatggctcgtccagaaacgttaactcttgcagagtttgtggctttggcagatcaaatggtggcataaatgactaagcgctataactatgtaattggagatgtgcaaggttgttttgaggcactcaaagcgctattaaaagaaatacgttttgaccctgatcaagattttatctggtttgctggtgacttggttgcacgtggtgaaaactctgtaggtgctctacgttttattaaaaaactagctgatcgaggggctgctgctaccgtattgggtaaccatgatttaaccctgattgccggtgctcgtggtcttaaggaaattaaagaaaaagatcgcacgcaggatgttattgacgccgtggatggtgatgatcttatcgattggttacgtaaacagccgttatgtttatttccaaatgaacaaacaatactgacgcacgcaggtgtaccttgtatttgggatgcacaaaaaactgctgcattggcaaaagaagttgaggctgtattggcgcatgatgatttatctgtgctagatgcatttttagctgaaatgtatggttcaaaacccgatctttggacagatgatttgacaggtaatgaacgtttacgctgtattaccaattacttaactcgtatgcgtttaactaatgcagaaggggctttggagtttagttttaaagatactttagatgcaccaatgccagaaggttatttaccgtggtttgaatttccaagtaaggctgcacaaacccatcaaatattttttggacattgggctgctctagagggtagaactattagtgagcacatccaaaatgttgatggcggttgtgtatggggtaaaaacttaattgcttatcgtcttgaagatcaacaagttttttctgtgagcaatcctgttatgtaataaaaaaagccgctgaagcggcttttttatttttaagatatttattctaggcgaatccagatctgattacggcctaaagcagataccccaaggtaaccgcgcatatgtagacgtttaccatttgcactgagttttgcttttaatccgtaaactttaccagtatttgggtctagaatttttccacctgtataggttgaattatcagtttgcttgagcccggttgcgatatctaagcctaaaataggcttattggtataaggtgcaggacagttatcacaaatttcttttggcgtataacctgggcgtggtgttatttttacgattttacctgcataagtaccatttgcctctttccgtatttctacatgtgctttaggtgtacctgttttatcatcaatcgtttgccaaagacctgtaatatcagctgcaaaagtagctgtatttattcccactaggagcaaagctccaacaaaaaatttccccataatcaaaaaatccttttagatttgaaaggtccatcttatttgtaattaataacgggttcaatgtttatttaaactactttttaatcagtgtattccaaaagataacatgaaggttggtagccaaatagcagtaaatacaccgtttaatgccataccaaatgccgcataacggcctgctacaggtccacgttgccaagcctgagcagttccaattgcatgtgcagctaagcctagagctaaacctgaagctctttcatcgtgtatatgcttaagtaaaaatggtgaaaatgctgcaccaataactccggataaaattacaatgagagtgactaatgtctctggagcatgtaataaggtcgcgatgtttaaagcaattggggtggttactgcacgtgtcgcaaatgccaaaatagtcggctcagacatatgcagtaggtaagcaaggcccattggtaaagcaacggcactaatgctggcaaagcataaaataccaatcaccgatttaagaggtaaatcgtcataacgcattgcagccaaaggtatagctaaagcaaccgtgacatatcctaataaatggctgaataaatcatttacgtaaagtcgatattcttcatagggaactttcaagattgacaatagcccaatgacaatgaacatgccgaaaactaaaagaggaacttgaggaaagcggcggtttaatggttttgcacaaaggtagccaactaaagtgatcaaaaatccataaagaatcataaacattttattctccttataaccaatgttttgccatttttgcatagacccacaagggtataagggtgctcactaccaaaacaaaaagaaatagcggaatttctttacccatatgcaccagcataattaaggagcctgcacaaatgggtaaaaaagcaaaaccactttctttcatgactttattattagtatcgacaagtcttagcgggattttcttaaatttacgccaaatgagtaaaacgataagtaaactaattaaacctaccagattgcctaactctggatgaccaaaagcacgcataacgacgactgagccttcgcgaaaaccgataataagtagtaaggttcctacccatgctgcccagtctatacttttgatcttatccatattttttatctctaaaagtttacttatcaagttttaactgatctagtgcttgatttcaaactcttccagtggtcttttaaactgacttgcgcgttcacctaatatctcatctatagggagtttggcttggcgaattaactgctcaagcttatgaggtgcaattcgtatgtcgatatgtaatagcccttcatcgtcataatgctcagattgaatgacatttaaagcataaagttgagtacgcaatttgccataagcaggtttaagtaccaatgagaagtgttgaagttgtcccattagacattcttgtacggcttgacgaagtaaatctagacctaaacctgaatgtgcagatacataaacacgatctggaacatgaggctctgaataaataattttcgcttcttcgccactcaaatcaattttgttataaacacgaagtacgggtgcatccgctccaatttccttcaatacaccttcaacggcttcaatctggtcaagcatgtcatgactactactatcgatgacatgtaaaagcagggtcgcttcaagcgtttcttctaaagttgctttaaatgattcgaccaaatcatgttgtaagtttcgtacgaaccctacagtatctgctaggaccaccgtaccaattccatcccattctagacgacgtaaggttggatcaagtgttgcaaatagttggtcggctgcatacacatcgcttttcgctaaaatattaaataaggttgatttacccgcgttggtataaccgactaatgaaacagttgggatcgaagctttttgtcttgcagctcgaccttgcatacgggtttgatggactttctctaacttatcttttaactgggtaatacgaacacgaatgagacgacggtctgtttcgagttgtgattcaccgggaccgcgtaaaccgataccacctttttgttgttcaaaatcagcagaccaaccacggattaaacgggttgataaatgttttaactgagcaagttcaacttgtaatttaccttcatgggtccgcgcacgctgggcaaaaatatctaagatgagaccggtgcggtcaataacgcggcattttaaaatcttttctaaattacgctcttgggcaggggttaatgcatgatcaaaaataacaagacttgcttctaagtcctgaacttgttctgcaatctcgtcaactttacctgaaccaataaaaaacttagggtccggtttattacgttgaactttaatgtgctcaagaatatctgcaccagctgactgtgcaagtagagcaaattcttcggcatccagatcatctaataattgtacagacacactcactaatattgtgcgttcaccgccttgatgccgatcaacatattccacgtggctataaatcctgaataaggtaaaactttattctagaggaaacttggacaaaaggggaaagggtttactcttattctttagattaactacagcgcattttatttttatttgtgtctatcacacagcgatgcaagtttattccgaaacgtatagaatggctcgagatgggtataacaatgattgatcgttagtgaaattttatgactcaaacgcaaagtatagtgaattcaacgttaaagaaattttcaaaaataggtttatacggaaaaaaagttacttcagcgactgcggcaatcagtgaaggtttttacttagtttatcgtcatggactttataaagatccaaataaccctgttaacactcgatatgttcaatatttctgtcgtcgtttatgccaagtatttaatcttgaagttcaagtacatggcacaatccccagagagcccgctttatgggtgagtaaccatatttcttggcttgatatcgccgttttaggttcaggtgcacgtgtcttcttcttagctaaagccgagatagaaaagtggcctattcttggcaatttggcgaaaggtgggggtaccttatttattaaacgtggatcaggtgactccattaaaattcgagagcaaattaccgaatttttaaaacaaaatattccagttttatttttccctgaagcgactactacagatggccattctgttaagcgggttcatggtcgtttactcggagctgctatcgaagctcagcgtccggtacaggtatgtttaatctgttacgtaaaccgtcatggtgagttagataccgttgcaccatttattggtgagatgtcattcgttgagcatattcaacgtgtgctagaaatgccgaaggtaacagctcatttacttacacttcctcctatttcggtagaaggccatgatgtaaaaagtttgactcaagaagtacaagaaaaaatggttgaaggattggctcaattacataaaaaagtacttaagccaaaaatttaattacataaaaccttcgagtggcagccatgatagtagtttcatgcctgccttttgccaccatttcatttctggttcttttttataaattacagggccttttggagtttcctgttgccagtaaatatgattgtttggatcgagctttaatttataagcatatttgtttaagttttcatccatcgtatggtgaattgttttggccagtgatggactatctaaaattacgccaatttcagtatttaaatacgccgaacgtgggtcaaagttaaatgaaccaataaaaacctgttcatctaatgccataagtttggtgtgtaaacttgagcggcttaaacctttcatgtttactttcgctttagttgccagctcatccgtatttttatttaaatcgcgtttatctggagttggtaaaaactcatacagttgaacgccgtttttcaaaagttctttacgatattttccataaaacgcatgaacaacagctacgtcatttgctttgaatgagtttgttaaaactcgaacttctacaccttctttagcaagcgtacttaaaattttagcgccttgcttttctggaataaaataagccgaaatcaggtcaacattgctttctggtttttccaaatggttaatcaattggaaatttaaatgttcttcttttttcgcttttgatctaattttatcaggtgagtctttcacaacctctgctttaacccaatcaaatttaatattacggtctaaccatttatcaaaagcatgtgatctagaggttaagtcaaggaagttctgaacggtggcttgttgataatgagcatcaagttgttgttttaagctttcatagcgcaaacggtgttgttgagcactgacgatactttggactgaatatgcatattcatgattccagtagtcatcaaaagaattcacgatatcatcaacggcagcaccaaccaacatgacatcgacgtcagaaaactggtaactgtcactgacgttgtaatactgatttgtcatattgcgcccaccaataagcgcaacctgattatcagcaataaagctcttgttatgcatacgacgattgatacgctttaagtctaaaatcatatccatcgcgcgatatttgcggaaacggtaggggttaaataatttaacttcaatatttttatgttgagaaagcgcgagtaacacgccttccatctttttagcattattatcgtcaattaataaacgtactttaacaccacgatcagcagcacgaataattgcatgtaaagctaaagcaccgactttatcgttatcccaaatgtagtattgtaaatctaaagtcttttcggctttatcaatcagccttaagcgagccgcgagtgcttctaagggatcatttaaaagatgataacccgttaaattcggatttttttcacgtaaaggcgtaataatttttgaaagagaagtttgagatgtatcgatatctcgtgcgtattggattggttcagggctatgtttgggtaatgtgctacaacctgtcaaagccacagcgaaacttgaacatacgactatagaagctttaatcaaaaagccattagccagttgatgagtttgaagctgtttggaatgaaaggattgtgccataatcaatacatacgataaggtgagctagagtataattcgtgcatattgaaagataaatattgaatttgattactagcaatcaatataagataagtcgagaatcgtaatgtggaacccaaattcaatcatcttttgtttttaccttattttttcaatacttgctctctggggaattattgaagcctgggttcatcaatcacgtactgaaacgattcatccatttaaagcttttgttcacttacttgctttttatctatcttatcttcttattccactttggttctttaatttatatgccggttggataggttattactcaattcatgaaaccatttttatctttttattaagcggtattctcatttacgcacgttttatagagccacatatggtacgtgtcgatgttcaccaatatcgtttaaatccagatcgtcgttttgctaaacctgtaaaagtcgctttaattgcagacttacatataggcctattctctgggcatgaacgtcaactcaaaatcattgtgaaaaagcttaatgaacaacagccagacttagtagttgtggcaggagactggacttatgagccagaagataagctagtacaagaactgagtgttcttaaagatattaaagctccagtttattcagttccagggaaccatgacgagcaatatccaggtccgcctattcaacaattattaaaagatgcacttcactacaatgatgtaatggacattgaaggaaaaattgttgagtttgatgagtttcgtttaatcgggattggtgacttatgggcagggaaaactgatatgcgttcaatgccagacttacctcaagataaaccatggttaattctttcccataaccccgatacggtagatatggtccctaaattacctaatcgccctttaatgttgtcaggtcatacacatggagggcaggtcgaacttccgtgggtaaccaactatattatgaaaaaagtatcaattttaggccataaacgtggtttctattcgcatgaacacgccgatgtatttgttaccgtaggaacaggtatggttggaataccattaagatttcgtgtaccacctactattgatattattgaacttgtataaaataaaaaagccaatcacaaaggattggcttttttataatggaaaatttaaggaataattacgatagcaacacgacgattaattgcccgattttcattggttgtattcggtacatacggttgagttgaaccacgtccaataacgtaaatattttcctttttaaaaccgtgagtcaagaagaggttcgccacactttgtgcacgttcttcagataacttttggttgtattcaggattacctacatcgtcagtgtgaccaacgatttttaatttattcaaatcatatttatttaattgatttgctaaacgtgtaagctctgcttcatgactttgttttaatgttgcgtcattaaaatcaaataataagcgttctggtaaacctagagtccagccttcattagtaagtacaaacccttctttttttagcatttttacttgacgatatttcaaaggaccaaaactcaagcagcctgcaagcgcaatgcacagcaatgcaataaaggagagtttcaaagatcttgtattcataaattagcctaaatttaattctctggtttataaataaaccaatgttgctcagaagtcttagccttatacatcgcttgatctgcttgcataataaaatcttctggactagacgcaaattgggataaagcaatccctacactaaaactgaaataaatcgtttgatcatttagatgcaaaggttctttacagctttcgagtaaattttcagcaatagatattaaatgatcggcatgcgtaatggaatgcaaaataaccgcaaattcatcaccgcctaaacgggcaataaaatcttgatgacgtaaacgcgtttgtaaccttttcgccatctcttttaaaacctcatcaacagctaaatgtccgaactgatcattaattgatttgaagttattgttatctataaacaataaggctgacttattatcaaaatccttatcttcaaacatatctaatagtatttgataaaaataatgtctattcggtaatagggtcagctggtcatgatgagcttgaaacgataatttacgattttccttttgcagctgattatcccaaatctgaatttcttcaagtaactcattaaaaactgtatttagatcttgaaactctttaattcggttataaggaaaacgaaggttataagctttttgttcactcacgatttgagcaatatttgtgagtggataaatcgcttgcataatttgacgataagtcaaattcactgaccaccacaatgcacaaacaataaacagcatcgcaatagcaaggccgaccataatcatctttaaaaattgtaatattttttcagagctaccaaaaagggtgagttcacctacattctgttgatgatgataaatcgtcaaatgtaccggctcatttaaaaaccagtgatcaaaccatttctctaacaccgaagtttgactcgacaacttaaaactttgagcaatcaggtgatgttcagagtcataaatatgaattgctcgaatagagtgatcatttgtgtattcatttaagatttgttcgatcgtgatcttatcgttaaacacaacggcaggctgaatacgctcaagaagagtatggctaagtaattgcaaattttgttttgcataagtttccatcgtaaaaacggaaattgatacaaatgtaaaagagcaaataaagaaagttatagcaaagatcgtaaattgagactttctaaaaagtgcatgtagcgaagtggattgatacaacttagatatcataatccttactccgcgttcttagccaagagtaaaacccttggatcaatatggaccttggaatggcttaatgcatctaagttaactttaaaagtggtgtaattattttgattatataaacaaaagatactaccaacttcacattctgggttattaatacttaaagaaagcaaagaacgatatggataattctgaattaagttttgttgctgctgaggtggtgtagtagagaaataaacagcctggcaatgcgatttagaaaaatctttagcattaacggtttgtacacgataattataagataattgttgaatataagactggaaggtagaagtaattgatgcattatcaattacgcaaagagtaggcgtgcttacattctcccatttgctataacttaaaatagataaagtgagcacataaaagttatgttttgaattggcataagcaggcccactcgtagcaaacactacaagtatgcaaaataatactttcttagcggagtgccacatggtgagttaatgccaaatcaattgcacgaataatctattctacatgaagttgaataactaaaaaaagtttaatatctcatctaatatctagtaaaaagcctaaaaaacgaccgcttgatatgaaatgctagaaaaaggggttgcaaagggagagagatggtctataatgcacatccatcggcggtgatgcagatagaaacttgttgaaaaacagttacttgtgattaggttgattgctttaagtgatgaatttgatgatgagatggtttagagaataagttttaaaaatatcgaaattacctgttgacttttaagagattaagagtaatatagccgacctagcttgctggtgatgaaccagtaagaagatcattaagagaattgaagaacaacttgtgtggatttttactgattgattaatcgaaataattttcattgattgattggtttaaattactcgaagtttatttgagcgaaatttaagtcagtaattgatgagccagaattggcaccttgtctataaataaggtgcaaaatgattttaactgaagagtttgatcatggctcagattgaacgctggcggcaggcttaacacatgcaagtcgagcgggggaaggtagcttgctactggacctagcggcggacgggtgagtaatgcttaggaatctgcctattagtgggggacaacatctcgaaagggatgctaataccgcatacgtcctacgggagaaagcaggggatcttcggaccttgcgctaatagatgagcctaagtcggattagctagttggtggggtaaaggcctaccaaggcgacgatctgtagcgggtctgagaggatgatccgccacactgggactgagacacggcccagactcctacgggaggcagcagtggggaatattggacaatggggggaaccctgatccagccatgccgcgtgtgtgaagaaggccttatggttgtaaagcactttaagcgaggaggaggctactttagttaatacctagagatagtggacgttactcgcagaataagcaccggctaactctgtgccagcagccgcggtaatacagagggtgcgagcgttaatcggatttactgggcgtaaagcgtgcgtaggcggcttattaagtcggatgtgaaatccccgagcttaacttgggaattgcattcgatactggtgagctagagtatgggagaggatggtagaattccaggtgtagcggtgaaatgcgtagagatctggaggaataccgatggcgaaggcagccatctggcctaatactgacgctgaggtacgaaagcatggggagcaaacaggattagataccctggtagtccatgccgtaaacgatgtctactagccgttggggcctttgaggctttagtggcgcagctaacgcgataagtagaccgcctggggagtacggtcgcaagactaaaactcaaatgaattgacgggggcccgcacaagcggtggagcatgtggtttaattcgatgcaacgcgaagaaccttacctggccttgacatactagaaactttccagagatggattggtgccttcgggaatctagatacaggtgctgcatggctgtcgtcagctcgtgtcgtgagatgttgggttaagtcccgcaacgagcgcaacccttttccttacttgccagcatttcggatgggaactttaaggatactgccagtgacaaactggaggaaggcggggacgacgtcaagtcatcatggcccttacggccagggctacacacgtgctacaatggtcggtacaaagggttgctacacagcgatgtgatgctaatctcaaaaagccgatcgtagtccggattggagtctgcaactcgactccatgaagtcggaatcgctagtaatcgcggatcagaatgccgcggtgaatacgttcccgggccttgtacacaccgcccgtcacaccatgggagtttgttgcaccagaagtagctagcctaactgcaaagagggcggttaccacggtgtggccgatgactggggtgaagtcgtaacaaggtagccgtaggggaacctgcggctggatcacctccttaacgaaagattgacgattggtaagaatccacaacaagttgttcttcatagatgtatctgagggtctgtagctcagttggttagagcacacgcttgataagcgtggggtcacaagttcaagtcttgtcagacccaccatgactttgactggttgaagttatagataaaagatacatgattgatgatgtaagctggggacttagcttagttggtagagcgcctgctttgcacgcaggaggtcaggagttcgactctcctagtctccaccagaacttaagataagttcggattacagaaattagtaaataaagattaagatcttggtttattaacttctgtgatttcattatcacggtaattagtgtgatctgacgaagacacattaactcattaacagattggcaaaattgagtctgaaataaattgttcactcaagagtttaggttaagcaattaatctagatgaattgagaactagcaaattaactgaatcaagcgttttggtatgtgaatttagattgaagctgtacagtgcttaagtgcacagtgctctaaactgaaatgttgaagttactaacttgtaggtaacatcgactgtttggggttgtatagtcaagtaattaagtgcatgtggtggatgccttggcagtcagaggcgatgaaagacgtgatagcctgcgaaaagctccggggaggcggcaaatatcctttgatccggagatgtctgaatgggggaacccacctactttaaggtaggtattgcaacatgaatacatagtgttgcaaggcgaacgaggggaagtgaaacatctcagtacccttaggaaaagaaatcaattgagattccctcagtagcggcgagcgaacggggatcagcccattaagttatgtgtgttttagtggaacgctctgggaagtgcgaacgtagagggtgatattcccgtacacgaaagggcacacataatgatgacgagtagggcgaggcacgtgaaaccttgtctgaatatggggggaccatcctccaaggctaaatactcctgactgaccgatagtgaaccagtaccgtgagggaaaggcgaaaagaacccctgtgaggggagtgaaatagatcctgaaaccgcatgcatacaagcagtgggagcaccttcgtggtgtgactgcgtaccttttgtataatgggtcagcgacttatattcagtagcgaggttaaccgtataggggagccgtagagaaatcgagtcttaatagggcgtttagttgctgggtatagacccgaaaccaggcgatctatccatgagcaggttgaaggttgggtaacactaactggaggaccgaacccactgtcgttgaaaagccaggggatgacttgtggataggggtgaaaggctaatcaagcctggtgatagctggttctccccgaaagctatttaggtagcgcctcggacgaataccatagggggtagagcactgtttcggctagggggtcatcccgacttaccaaaccgatgcaaactccgaatacctatgagtactatccgggagacagactgcgggtgctaacgtccgtagtcaagaggaaaacaatccagaccgccagctaaggccccaaaatcatagttaagtgggaaacgatgtgggaaggcatagacagctaggaggttggcttagaagcagccaccctttaaagaaagcgtaatagctcactagtcgagtcggcctgcgcggaagatgtaacggggctaaaactatgtgccgaagctgcggatgtatactttgtatacgtggtaggggagcgttctgtaagccgatgaaggtgtgttgagaagcatgctggaggtatcagaagtgcgaatgctgacgtgagtaacgacaaaacgggtgaaaaacccgttcgccgaaagaccaagggttccagtccaacgttaatcggggctgggtgagtcgacccctaaggcgaggccgaaaggcgtagtcgatgggaaaatggttaatattccattacttctgtgtaatgcgatgagaggacggagaaggctaaatcagcctggcgttggttgtccaggtgaaaggatgtaggcatgtatcttaggcaaatccggggtactctatgctgagatctgatagcaagctgtacttgtacagcgaagtggttgatgccatgcttccaggaaaagtctctaagcttcagttacacaggaatcgtacccgaaaccgacacaggtggtcaggtcgagtagaccaaggcgcttgagagaactctgctgaaggaactaggcaaaatggtaccgtaacttcgggagaaggtacgctgttgttggtgatggaactcgcttcctgagctgacgacagccgcagaaaccaggccgctgcaactgtttattaaaaacatagcactctgcaaacacgaaagtggacgtatagggtgtgatgcctgcccggtgctggaaggttaattgatggggttagcgtaagcgaagctcttgatcgaagccccagtaaacggcggccgtaactataacggtcctaaggtagcgaaattccttgtcgggtaagttccgacctgcacgaatggcataatgatggcggcgctgtctccagcagaggctcagtgaaatcgaaatcgctgtgaagatgcagtgtacccgcggctagacggaaagaccccgtgaacctttactgcagcttgacactgaactttgaccttacttgtgtaggataggtgggaggctttgaagctggaacgctagttccagtggagccgtccttgaaataccaccctggtaatgttgaggttctaactctgtcccgtgatccgggacgaggaccgtgtctggtgggtagtttgactggggcggtctcctcctaaagagtaacggaggagtacgaaggtgcgctcagcgtggtcggaaatcacgcgtagagtataaaggcaaaagcgcgcttaactgcgagacccacaagtcgagcaggtacgaaagtaggtcttagtgatccggtggttctgtatggaagggccatcgctcaacggataaaaggtactctggggataacaggctgataccgcccaagagttcatatcgacggcggtgtttggcacctcgatgtcggctcatctcatcctggggctgaagcaggtcccaagggtatggctgttcgccatttaaagaggtacgcgagctgggtttagaacgtcgtgagacagttcggtccctatctaccgtgggcgctggaaatttgagaggatctgctcctagtacgagaggaccagagtggacgaacctctggtgtaccggttgtgacgccagtcgcatcgccgggtagctatgttcggaagggataaccgctgaaagcatctaagcgggaagcctacctcaagataagatttccctaggactttatgtcctctaaagagccgttcgagactaggacgttgataggttggatgtggaagcatagtgatatgtgaagctgaccaatactaattgctcgtgaggcttgactatacaacacccaagcagttgtatatgaagcatcaatcgattcttaagtatgcaagacaacttgatttagttatacctctagctaaaatgaacagataaagtaagattcaattcagcccagtctgttacagatttggaaaacgcttcggcattaaataagacctaagcaagtatccataaacagttgtgctggcgaccatagcaagagtgaaccacctgatcccttcccgaactcagaagtgaaacctcttagcgctgatggtagtgtgggattacccatgtgagagtaagtcatcgccagctcattattctaaacaccccaatctcaaaagaggttggggtgttttttttgggtaaaaagtggttagggaataaaaataaactgtgtattatctagctgaacgaatttagcctcaatcaagcaaaaatgtatcactcaacagaagaaggcttcttgaagtataaagagctaactttgcaagagaactctcttttaataataattatttcaactgtctgcgagcatgtttaagagcagtacgcaggccttcttctagtgttggatgataaaaaggtttctctaaaatatcatttaaagttagctcttctccaataatccagcttaatagatgagccatatgttctgtagcttcggtaaataactctgcaccaagcaatttctgacttcctcgctctatataaacttcaatagcacccttatttttcccgagtacgatagctcttccttgtctttcataagatgcttcacctgtaacaaaatctactccattatctttaagttgtttataactttgtcccacaattgccatttctggatgactaaatacaattcctaatggagtaagtgttttaactgcgtttacctgtggataattcaaacagttatgaacaacttttttaccttcatgggcagcttcatgttgtaaaggggtagaagtgtatgcatcaccagcaataaaaattggatagttatctagttgtttagtttttgcatttacaggtagtaatttaatatctttaaaagacttatcaatattttctaactttagcgtgtcaagtaagctcgaacgacctgttgcagataacacgtactcagtctggatagattcttctttttcattaattttataattcaatataacaccatcagaagtagatttaacctcatgaggcaatgtctcaaataaaaaatttaactctttactcagttcttcttgagcgagttgttgtagcttaggactagtaaatgtcccaattcttttactacgagcaaatatagtggtttctacacccaaacgatgcatggcttgggcaatttctagggcaattactccacttccaataatagtgatagacttgggtagggtgtttaattcaaatatttgatctgtagtaataagacgatcatctaattcttgtttccaagtttgatcataattaggtgtagagcctactgctaaaataaaactttttgactgataccgtttaccatttacttcaatagtttttgcatcaataaaatgagctttacccgaaattttatgttcagtgggccattgttcgacatcttttactgtggccttagtaaaacgatcacgtaaggttctcacatgctccataacctgatcagtactaatatctgctgaagcactcagcccaacctcttgagcattttgtatatcatgcatacggtttgcagtagagattaagactttacttggcatacaccctacacgtgcgcaagtggtatcccatggtccatcatttataattaaaatattgttggtatgtttaacggcttctttgtatgcgctaataccagcagtacctgcgccaatgatgataatatcgaacattataaattccaatatctataagtttttcacttaataagttacataataaaactcaatgtaatttatgtttacagagtatggtgaatatgattacactaataatataaataattaaaaaatcttatacctttaggaaagattggggaaatgaaaattatgtataaaaaacaacttaccttaaagttgtcggctattgctgtgtcaattatgttagcaagttgtggcgggggaggcggtgatggctattaccaaaatggttcatcaaataactcatcatctggaagtaataatagcggatctcagcaagcgactgctacagctttaaagatagaactagataaattatcagttgccgcaacgaatgatactttaactgttactgttagagctttagataagaataaaggcggtgttgctggtgctaatgtcactttggaattagatgatccaacaaataacgtatctatagaaggcgtatctactcaaactactgatgcggcaggtaatgctatatacattataaaaacaccaaaaacatcgagttcgataaatgagttggtgaaaaatggtttcaaattaaaagtctctacgaataatggtacgcttactcaagaacagacagtgacagtaacaggtagcaacagtactgtcgaagctgatactacgagtattgtattgtttgatgctacaaaaacctctctaaatgttagaggtgatcaaacaaccgtcacattaacagctgtagatgcaaatggtgcaactttagcaaaccaagcgattacacttaaagttagaaattcagttttaaatggtgtcaaatttactcctaatgcgacacaaactgatgtaaatggtcagatcagctatactttatcttttagtgaaaatcaaagaacctcatcatatagtgctggtcagttcgtaacagatgatcttgttttagaagcaaactttggccaatctacaaaaatttatacttataaacttgatgtggttaattctgatgtaccagtagcagtaggcgctattgccgtagcatataatccgaccacaatggaagattcaagtgatggagtctactactataaaaatatttcagtacaagtgactgatgtggatggtaaaccgatacccaatcaagatgtagtcatgggcgttaatgctcttgcgtattataagggtcgatatgggtttgttgatacttctaatccaactgatggtaaaccagatgaatatcttcctgttattagaacagcctgtacatcaccagtccaagctgtaaatgtgaatggggacgttattaatcaattaaagccgcttaaagaaaattctacagtccaagttgtatcgtatattaacagtgcaggtaccgctgcaaccaataataaatatacgacagatgcaaatggacgttttgatcttaaaattcaatatcctaaaatttatgcatcatggttaactgttcagttaacggctaaatctacagtttcgggaagtttaattaaaggttctacatccttaactttaggttatttaactaaagatgtcagccttacggatcttaatggcccaaatatggaaagtccatatggaatagatccaaactgttcaaatggtaattaatataaaaagaagcagcctttgagctgcttctttttttagagttgtgttcccatacttaccccgacagtagggcgtacttgcatagatgaacatgcgctgagaataaagcagcttactaataaaaaaatcaatttattcataaaataactaagaaaataaaaagtgacttaacaactttagctgaagacagtttgtatatctgttgaattgatgcagttgtatattttttttattaaaaaaaagctctatctttaaataaaaatagagcttatgaatttatttaatcgtctaacaaatccatttgtttggctaattgataaagattatttgaacggtttccagtacggcagaacatgaggaccggttttggaagttcattatagtgatttgcaaaagtacgaacatcaagttcagtaatttggccagctacaacaggctgataaacataatctaggccagcttggcgtgctgcttcttcaatttgagcactggtaggttgttctggaccaccttccatgtcaggacggttattaataatagatttaaagcctttttctacaacttgacccacatgttctgggccaatttgacctgcgaaaccaacattctctgacatttcgtcactccaaaatttaataaaacctcttatgctgtatcatagcattaagcttaacctgagatacaagacactaaaacgttgttcctacatagataaaatttatgtaaaagaacagctctagatttttaaaaggcgatcaggatgttttttgtaaattcattacttcgaccataatgccacggagcacatatgcacgcttatacggttgagcctttatatgttccatgtgatcaggaaatgatcgcagctgacttttatattccaaaaacaaataataaatctgcggtaattatcatggcacatggttttgccggattacgtcaattcaaactcattcaatatgcccagcgttttgctcaagctggctatgcggttattttatttgattaccgatattggggtggaagtacaggtaagccccgagagatgatttctatcaactctcaactagaagactggaagaccatgatccaatacgcttctacgtgtaaatttatagataaccgaagaattgtattgtggggaacatccttaagtgggggatatgctttaagcctagcttctgaattaaagaatattcaggccattatggtacaaattccatatgttgatggtgcggaaacagcaaaattatatccactacagcgttatccccaagctttaaagttgtcgagccaagattatatgggttcaaaaatgggccttaaccctaaaaggttacctgtggtagatcaatataaattgtgctttatgccaacagcagatagctattatggttatttatcgattgtgaatccggattattactggagtggagaagtcccggcacgcgtgttttttaatttgatgcgttatcgcccaattcaacttgtacgtcaaattaatattccagttttatttattgcggctcagcatgattctttgattccaattgagtctagtcgtgaagctgcgactaatattgctccttttgtgagttatcatgaatgggatatgaaacattttgatatctatcacggttcatggtttgaaaaagcagtgacgacccaattagaatttttacatcagcatataggagtgatgtaaatgattattgtatgtgcatcgtgcgatgcaaaaaatagagtaccagaggaaaaacttaccgctcaaccgagttgtggacaatgtcatcagccattactcccgcttgagccaattgagttaaatgaacaaaactttagcaactacatcacaaatagtgatctgcctattttgatagatttatgggcagaatggtgcggaccttgtaaaatgatggcgccacattttgcacaagttgcaaaacaaaatccacgtgtcatttttgccaagattaataccgaagagtctcctcgcttaagccaagcatttaatgtgagaagtattcctacccttgtattaatgaataaaaccacagaagttgctcgaatgagcggagcattacgcgcgcctgaattgcaacagtggctagatcaacaacttcaaacgaatttcgggagctaaggtgtcagaagcttataccaaaccagaaggaattttatccttacaaacgattgccatgccagcagatacaaactggagtggtgatgtgtttggtgggtggatcgtgtcacaaatggacttggctggagcaattcacgcggagcgttttagtcgtggtcgctgtgctacgatttccattaatcagatgacctttttggttccggtaaaagtaggctttgtcattagctgctataccaaaatcctaaaagtgggtaatacctctattcaaatgcaaattgaagtttgggatagccatgatgactctcgtgccccaattcgtattactgaaggggtctttacctttgttgcagtagatgtaaaaggcaacaaacgtcagattcctgaggaagcgaaacagaaatttcttgcctctcaagaatcgtaataaaaaagcactactatagtagttagtttagtttactttattttagcccaaatttgaatttgggcttttttatatctttatttcttacgtttaggtaaccatgcccataacatttggcattgaatcggttcattaccagcatcatcaatcactgtaactggaataacaagttcacctttctcatgatcagcaatatatttttgctgttcggtagagagagtcgctgttgctgttaaaccaccttcaaccacttttaaataatcaacatgtaatgatttgattaataaaatacggttatctggaatatgtaaacccgttagaaaacctgttgcagtttctgccaaaagcgccatagccgcagcatggacacctttaatatggttctgcatatttttttgattctctaagcgaaccgtcacatggtttacatctacttccagatagcgaatgtttgctgtacccaccattggcacaatgcggccaaatgccttactccaaagcgtactccgaatacctttagggaattttgaagttgcttttaccagttttaatagacgattggattgagacatgggattaccttaattgggaatatcatgctaagacattaatctttaaagttattaaattgtaatggcagaccaaattgttgttcacgtaaaaaagccatcacttgttgtaaagtgtcacgctttttatcagttacacggattttgtcaccttgaatagatgattgcactttgatgccactttctttaatggctttattaattttttttgctgtatcagagtcaaggccatcttttagtttaatcacttgtacaaaatttttgcctgatgctgttgctttctgtgggtcaagcgcttgcacatcaattttacgtttataaaagtgattttctaacatgttataaacttgttcacactggaaatcactttctgtactgatttttatctctttatttttttcatttaattcgatagaaacatcatgaccacggaagtcaaaacgtgttgcaatctctttttgggtgttttgtacagcgtgattaacttcaaataactctaattcggaaacaatatcgaaagaaggcatagtttagacctttacaaagtgaaagaatatttgagatgctaagagggttttcttcatttgccaagtgttgtttacatcaaaggagtgcacaatgatccgtaaacaagaaattacaacatttgagttcccagaaaatgctgttatctgggatgtccgtgattcaagtgcttatgcagaagggcatgttaaaggtgcggtaagccgcccaattaatgatttaaatgctgatattttgaaccaggtcgctgcggatcagccgatttatattttatgtggtggtggtagcaaagctcctcgtgcagctgagaaactagaaggcttagatgcctcgcgtgaatatgtcgtgctgatgggagggacgcgtgcagctcgtgacgcaggtttacctctagagcagggcgcataaaaaaagcaccttcgggtgcttttttattgggaccaaattttctcaagtgcactattgagatttaaaataaggtttcttaggtttaactttcttttgaaaacgttgggcatctaatttctgtaataggcttttgggaacaggacaagcttcacctaaaatttgggccactaaaacttcactacaaagcggcgcaaataaaaagccctttgagcctaaacctgcaaaagtagaaatacggctttcattctgcatttttcccacaagtggaaaataatctggactttgagcgcgaactgatgctcgtccttgccattgttcgactggtggtaattgttttgcataatgagggaaaacgctgtggattaattcaaagttatgcacatggtcatcaagcagtacttcttgatcgtctcggtttgggtagaaagaagcccctagaataagttcagacgtattcagttgcatacaataaccgccatagctataggcttcgtttaaaggtaaggttgcaaaagaattatcaacccagctcacctgtccacgtataggttttaatagcggataattttcaaataaagcagcactttctctggcgcagcacaccacgacatgatcagcctctaaagtagtttcattaccactttttaattgaactttattttcaaaagaaataagtgtcgtgatattggcaattttcagttcaatacctggatgttgcaaaatctcatcgcgtaattggtgcggagaaactgctccagcttcggtcaacaaaatatgtggatagtctgattcaagtgagcttgtttgctgcgtgacaatatcagcaggatattgatcagcaagatcgagaagatcttgtgcattttttaaagccatttgctgtatttgaatgggacgaaaggcttgaaaatttttatagaaatttaatgcatgttgccagcttaaagtcatgagatgctcatggctttgttcaattgggcatagtttcggattaagcaatgccaacggattgccagaagcacctgataacggcactgtacgctcaaatagagtgacctgatgcccacgttgagcaaatgcccaagctgtgcttaaacctgcaatcccagcgccaattacggcgatacgctgctgagtaaattggaaagtatctctaactggttctaataaaatttcttcacttacaggtgctttccaaacggctttaagcatttcccgtttatgcccaaaaccgcgaggacgagtaatatcgactccgtgagcctttagcccacgtttgagaataccagctacactaaatgaggcaaaggtagtgccatagtcggaaagccgaacaatattatttaaaacattttgttcccacatgtccggattacaagaaggcgcaaaaccatctagaaaccaagcattcactgccttcgtttttaccatacttggaaaaatatcttgtgcatctcctaaccataggtcgatgctgaagcgctcttctggaaaacttaaacgatggcagcctgcaagagggaagggatattgctcaataagttgtttggaaagcggtctaagttcatcccatacatttaaagcacgaatgagatcagctttgcttaaaggaaacttttcgacgctaattgcatgtaaatgactgtggttatttggacgtacttgttgccatagttgccagagcgcaagaatatttaaaccagtgccgaacccggtttctcctacactgaaatattcaaaatcttgtaaattggctaatcgttctgataggtcattgccatttaaaaatacatgccgtgtttcaagcagaccattatctttagaaaaatagacatcaccaaattgtttggaaatgggaacttcaataccatcaatagattcccaatccagctcagcagtttgtatacggtttgatttgttcattcggtttaataagtcgctcaggattaccactgacgtcgacgtttggtgtaaacataactcgcaataaagaagccaagcagtacgccacctgcaagagttactgcgccatataagaacatttgagcactacgttcactttgtaaaacttgtacctgaacagacaagttatcgttctttagctgcaattcttggttttgtgctagcgcttcaaggtttgcatgttctagctgttttagacgagatgcttgatcttgaactaaagccttaatttttgcatcttgctgttgcttgttctttgcgatttgttctgctgtaagcggttgtgttgaggttggtgctgttgtagtcgcgggtttagctacagttgcagaagtaggtgctggtttagcattctgtgttgacgctgcagttggaggcgttgctggtgtcgcagcaggttcaactgctccggcagttgaacatatcaaacacaagccaagaaagcttttggttgcaagctgcatgcgtttacccttttggaaatgctttattaaatggtttgacatcaacatgactatagatgccttctttcaaaaatggttcttcttttaaccattcatctaaggcttcacgtgtatcaaactctacaatcatggtgctgccatagaaaccagcttgcgggtcattagggtcttttggcatcgctccagcagcaactagacgaccttcatcatcaagtttttgcaaacgttcgatatgttgaggacgtactgctaaacgtttctctagagttccttcgttatcggtacagcttagaacaaaaaaaggcatgtcatcgtatctctataatcaatccgaaaccacattaagcatctggtgacttaaaatgtttacgtaaaataatgaactgaataatgataaatgaaaacatgacaatcatgtcaccaaatgcagtaaattcaccccaatattttccgccgtggaataaaaacgcaaagaaaacatgtaaaccagacatcacgacaaacatagctgcccaagcaaagtttaaatttttccaacctttttcgcttaaggctaaaatcggatcaaataaacgttgaataagaggcttacggtctttaccaaaccaaggtgaaactaagaaagcacctgcaaaaactagattcaaaatagcggcttttaagcggatgtaaaaatcatcgctcaacataagggtaataccaccaaaaatgactgtcatgaacagcacaatccattgctgtttatccagacggaacttttgcatgatgaacaacgcaccatacactaccagcattgaaataattaaaccggtagtagcgacaagaatattattattatcaacaccgccagcagacccgatcagtttgagtaaaggatgctgtgtatcggctggatcaactgtcttatataaataaaagaaaataattaatggaacaaagtccagtagtgctttcatgttagagtatctgatcaggtttggtgaatggcatagtataaaagatgcaaggcatagatttacatacacatagcaatatttctgatggaactttgtctccggaattgctagtgcaagctgctgtcgatgtgaagttgcatactttagcgctaaccgatcacgatacgatggatggattgcagcgtgcaaaaaatgctgcacaaccccatgatttgcaaattatttctggtgtagagatttcaagccagtggtcacgaccaagcacgaaaaaaagctatggcgtacatattgtggctttaaatatgcaagatgaagctccaattttagaagcattagaacaacaaaaaagaattagagcacaaagggctgaagttatttgtgaactattaaaaaaatgtattggctttgatatttatcaagatgtgctcgataaagttgaaaatcaaccagaccggattaccagaacccatattgctaaagccttagttgaaaagaatgtagtgagccgtcctcaacaagctttcgatcgttttttaaaagaagggaagcgtgcttttgtaaagtttgaaggattgggtttaaaagaaaccattgaggttattcataacagtaaaggatttgcagttttagctcatccaacccgttatgatttatcggctacaaatacccggtatttgattgagatatttgcaagttatggtggagatgcggtggagctgccgcctcctgtagatcctttatctactcgccaaatgattgatcgtatgattgaacagcatcatttggctatttcaattggtagcgattttcatggtgaaaatatgccgtggattaaattaggaaacacccctaaaccagcgagtaaccagcaaggcatttgggaacgttttatctaatcgcattttagagcaagttgttatcttgagcttgaattggaggaggtgtgggcttaccaagtgtccccaaaagctcaatttcgatactacgtaccattgcatctaaaggtaaatcattactttgcgtgccaaatggttcttcaatttcggtacttaaagcatcaagtcctaaaaatgtataagccagaattccaaccagtaaaggcgttgctaaaccaagcaaagatcctaagctaaacggcaacataaaacagaaaaaataaacagtacggttaagcaaaactgaataagcaaacggaataggagtatttgcaatacggtcacagccagtttgtacgacacttagatctgcaacattcttattcatttgagcataaataatatctgaaatttccccttctttaagcgcttgtaataattcccattgaataaggctaagcgtatattgaggtgcgttattttgttggtaaagttgggtaagtgcttgttggctcatgccactggtttgtattagctcggtggggttggctgtttgacggcgtaaacggtcacgtaatacattggcaaatacaataacgtgctgaatgacacgttcacggcgggcttgagttaaaattcggcagtcacggtcgaaatgacgcgaagttgcaatcaggaccccccataattttcgggcttcccaccagcggtcataacatgcagtattcttaaaacctaaaaaaatagaaagtacgacaccaattaaagtaaagccaactaaaggaatttctggaaaacgataaaggttaatgtattcaaccccaccaatgattgccgaaatcagcattactacccctaaagagggcaaaattttaggtaatatcgtccctcgccaagagaataaaactttaaaaatactgggctgttcacgaacaatcattttattttaaacgtcgctatttttgttttgatattctaagcttagtgaagctttgtcaatatcattgaacggctattgaggtagggttgagcagttgttgttcagcaaatgaaaagctaccttctggcgagataataaaatggtccagcagacgaatttcaacaagctgacaggcctgttcaagttgttgtgtgagtttaatatcttcgagagagggctgtgcggaaccaaatgggtggttatgtgctattactaattggcaagcgtgctgttgtaaggcataacgtaaagtttgattcactgaaacagcgcagtgttgaactgaaccaaaaaataactttttaaaatgtagttttctcaactcggcatctaagcaaagtaccgcaaagacttcttgtttttcaccttttaattcgtaacgtaaataatctagaactaaatgagaagaatgaaggcttagctcagtctgactaaaatgatagtcgagataacgccgtccaagctcttttacggccagtaattgggaatacttggtagctccaataccattaaattgagctaattcattgtaagatgcatcgaaaacagcgtttagactaccaaactgttgaatcagtaaacgtgcgagctctactgctgaatgttgacgtgaacctgagcgaagaaagatcgcgagtagttcagagtcagaaaggctttgagggccttgttgtaataaccgttctcttggccgttcttgttctggccaatttttaatagaagtattcatattccccagcaagattctgcttaaaaatttattttgtttgcccaatcaatcttgggtctgcgcgtatttaatgctattgtgagcgccactgcaacagaaaggtatcctgttcgtgagctttgatttaagtgttattcctcataaaaacattgttttagctgttacaggtgggattgctgcctataagagtgccattttggtccgtcgtcttaaagattatggttttgacgttcgggttgtgatgacacacggagctcaagcatttattacacctctaacctttcaggctctttcaggaaatcctgtacataccgagcttttagaccctgaggctgaagctggaatgggccatattgaattggctcgttgggctgatttattactggttgctccagcaagctgtgacacattagctaagtttgctaatggtttggcagatgacttactcagtactttatttttagcaactaaagcgcctgtgtgggtcgctcctgcgatgaaccagcaaatgtgggctgcaaaagcaactcagcgtaatttgcaaactctggttgaagatggcgtacatgtgattatgccagatgcaggggagcaggcgtgtggtgatgtaggcttaggccgtatgccagaaccagaagaaattgcaaggcaagtggcgggttatttccatcaagcccaacgtgcaattgctgaaaaatttgggttgttggcaggtaagcgagttgtaattactgctggaccaacccgtgaggcgattgaccctgtccgttatatctcaaatcatagtactggaaaaatgggctttgctttagctgcggcatgttatgcagcaggcgcaaaagttacgttaattgctggtcctgtaagtttagatactccaaacggtgttcaacgtgtaaatgttgcttcggctcgacaaatgttagatgtcagtatggagtcgcttgagactggctgtgacatctttattgcgacggcggctgtagctgattatcgcgtcgccgaagtggcagagcataaaattaagaaagcaggggatgagctgaatgtttcccttgtaaaaaatccggatattgtggcaaccattgcagctcaggaaaaacgtccatttatggtgggctttgctgccgaaacgcagaatgttgaagaatatgcagcagggaaactcgttgctaaaaagctagatatgattgcatgtaacgatgtttctcgcgccgatattggctttgcttctgatgaaaatgcgatgacagtattttttgctgaaagttaccatatgaaaaaacgtgagttagaaaaagcatctaagcaagaaatttctcaacagctagttgaagctatttcagatgcgttacgccgtaaataatttttgaaccaaataaaaaaaccgcgaataaatcgcggttttttatagtctcatttagacaatcaagggatttcatcttcaaattcaggtttgacctgaacaatgaagtcttgacggttaagaccacgccataaggcaaatgctgtaccgatataaatcgaagagtaagtaccgacaaagacaccgacaaacattgcaacagagaaccagtgtaagccatcaccacccaagaacatcattgcaagtactacaagcaataatgtcattgaggtatggatggtacgacgtaaagtctcagttaacgcaatatcaacgatttcacgtggagtcgcgccgcgaattttacggaaattttcacggatacggtctgaaacaacgatgttatcgttaagcgagaaaccaatcaccgcaagtaccgcagctaaaactgtcaggtcaaatggccattggaataaagcaaatgcaccaataatgatgatgatgtcatggaataaagacatcacggcacccattgcgagtttgaactcaaagcgaatggtgacatagatcaacattaaaatcagcgcaagtgcaacagcgccagccgaacgaacataaagctcgttacctacctgaccgcctacagagtccactttatgaacttctgctgcattgtttggtaattgcacagctttggtaatggcgttattaagatcttcaaccttaatatcttgtactggcatacgaacaagtaagtctttattactacctaaagtttgtactacagcatctttaaaaccagctttatcgagagcctgaataacttctgcctgatttgctggctgagcatagttaagctcagctgaaacaccaccggtaaagtccaaacctaagttaagacctttggtcgcaataaagaaaatgctcgctaaagtaataaggatcgagaagattgctgcaggtttagcaatcttcatgaacgggatgatttttgcatcatccggacgaccatattgttttgaaggctgttgagtcactttagtcatcatagatctccttaaatgctcaactttttcaagttacggcgtttaccataaatgatttgtacaatcgcacgcgttactgtaattgcagtaaacattgagcaaataataccgatcattaatgtcacggcgaaacctttaatcgggccagtaccgattgcaaacagaatgaatgcaacaaggaacgttgttaagttcgagtcgaaaatggtgttataggctcgatcataacctgccacaatagcctgtttaggtgaggccccccagagcatttcttctcgaatacgttcacatatcagtacgttggcgtcgacggccataccaatggtgatgacgatacccgcaatacccggtaaggtgagggaagcacctatccaagacataatggttaaaatcattgccaagttaaatacaagtgcaaagttcgcgattaaaccaaatagacggaagaacacgaccatccagattgcaacaagcaagaaaccgatttgcgttgatagtacacctttatcaatgttttcttgaccaaggcttggaccaacaacacgctcttcaacgaagtacattggcgcagctaaagcaccggcacgaagcattaacgcaagttcagatgcttcttgaggtgaacttaaaccagtaatacggaaagttgaacctaaaacggcttggacggttgcggcattaatcacgacagactcggtatatggtgtacgaacttctgtttgagcaccagtttttggatctgtaacgtagctaatcttttgtttattttcgatgaacaataccgccatgcgttttccaactgcattacgggttgcatctgacatcagcttaccgccagcactatcgagcgtaatatttacttcggcaccaccagagtcttggctaaagccagaacttgcattttgaacgcgttcaccagtcaagatacggttacgttgcaacaacagttggcgaccactatctaaagactgataagcaaaaacttccgtacccggaggtaacggttgaccattatatttacccgtatatggatcaatatattgatcatttaagtcagataccaaacggaattcgaggttagcagtacggcctaaaacacgtttagcttctgctgtatcttgaacacccggtaattcaacgacaatacggttgctaccctgactttgtactaaagcttctgcaacaccaagttcgttaatacggttacgtagtgttgttaagttctgattaactgcataagcctgaatttcttgacgacgtacatcagtataagtgagctttaagattgaacctgtcgtgctcgctaatgcctgttgggtatattcattaccattacggcgtaaaaaatccattgctgcatcacgatccgcattgtcagcaaactgaacagtgatcacattattatttaacgcaagattgttaaatttaattttgttttcacggaactgacgacgcaaatcagtggcagaggtttccatacgttgggaaatggctttgtccatatctacttcaagcaagaagtggacaccaccacgtaagtccaaaccaagtttcattggtttcgccccaattttttgcaaccattctggagttgttggtgcaaggtttagggctacaacatattgatcacctaagtcacggcgtaatacttcttttgctttcaattgcgcttcagaagagctgacacgcaagagagcagcattatttgtaaaagtattatcgtggcttgcaatatttgctgtttttaaaatttgctctgctttttgcaccacactttgatcaatttgggtaccagctttggcaccggaaatttgaacggcgggctcatccggatatagactaggcagtgcgtataatgtactgactaccagaacaaccagaatcagtaaatatttccatgcagggtaacgcattcgctttcttcttaaatgaaaaagccgtgctaaagcacgactgttttatgattaaaggttatttagagtgccttctggtaatacagaaattacgctggcacgctgaatttttacttctacaccacggttaagttcaacaaccgcatagtcaccttcaagtttagttactttgcccattaaaccgccagcaaagacaacttcgctaccaacacccaagctttcgattaaagaacggtgttcttttgcacgttttgcttgaggacgccaaattaagaaatagaagattgcaacgaatacaacaatcatcaaaatgtttggtaaaaggccagggctttgggctgctgctggagctgcatgtgcagtagaaatgaacaagctcattttaatttcctaaagttaaaaaatatgagtcagatacctgacataatcctaattcgttttgcaatttaccttgtcttgaggttgagcgcaaatctcgcttattcatcgacagggcatggtggaacttctaatccgcggcgggcataaaagtcctgaacaaattcatcaaaagtgccattgtctaatgcatcacgcataccttcagttaaacgttggtaataacgtaagttatgaatggtaccaagcatagatgccaacatctctccacacttctcaaggtggaacaggtaagcacgagtaaagttcttacaggtatagcaatcgcagtgtgggtcaagtggtccttggtcatgacgatatttactattacgaatacgtaccagaccatcagtgacaaaataatgaccattacgtgcgttacgtgttggcattacacagtcaaacatatcgacaccacggcgcaccgcttcaacgatatcttcaggtttacctacacccatcaggtaacgtggtttgtcatgcggcatcttgtttggaagataatctaaaaccttgatcatctcttcttttggttcaccaactgacaaaccgccaattgcgtaaccgtcaaagccgatttcaagtaagccatttaaagactcatcacgtaagtcttcatacatgccgccttgaataatgccaaataacgcatttttatttttaagttcatcgtggtgatgagtcttacagcgttttgcccagcgcaaagaaagctgtaatgatttttgtgcttcttcatgtgtcgcaggataaggcgtacattcatcaaaaatcatgacaatgtcagagttcaatacatgctgaatttccattgaaatttcaggcgataaaaagacttttgaaccatcaatcggagaacggaaagtaacaccttcttccttaattttacgcatagcgccaagactaaatacttggaagccgccagagtcagtcaaaattggcttattccatttaataaagtcgtgcaagccgccgtgttgcttgatcacttcaaggcccggacgcaaatataaatggaaggtattacctaaaataatttgtgcctgaatatcttcaatatcacgtggcagcatgcctttgactgtaccgtaagtccccaccggcataaaaacaggggtttcaacaacaccatgttctaaagttaaacgaccacgacgggcacgacccgactgacctaatttttcaaacttcatttaaaaatcctgaacaatagcaagcaatgccttagggcagtgcaagggcgaaaaaacagttcgctgctaaaaagagggctattttccttgattctgcgacgtagttctactactaaatgtagctgactataaaatcggtcaaatttccggttgaccgattgcttttttacctcgactaaaagttcggtttatagtcaaaattgtcagtagccaaattatctcgaaaaggacgaattgtttttttagataaagtcatcgtattgataatattatttgggaacacttcaatctgattattaaatacttcgacgttgcggttaaaaatgctgattgccgcgccgacattttcgttttgttcctgaatatcatccatcattttgccatagagcgtatctgcttttagttcaggatagttttcaaccacgacatttaggctgtggattagctctttgctcattttttcaatctgttgtaattgagcaatatcagtatgatcgacattcaaacttagaatttgctgacgtaaagcagttacttgttctaaagttgacttctcgaactgagtatattgattgagtgtggtttctagtgcttcaagtgtttttactttctggcgttcgaaattggcaacctcagcccaagcgcgtttggtcgcattgaaataacgcacaatgttattgcgaatgtggatgccccaagcaatcagtacaacgaaaatccccaagaaaatgaataaacctgtcatttttactcctcttattgttattccctcattatgccctctaacttcttattttttttaataagttgccagttcagcagtacgagagatttatttaattaaattaagcatgaattgctgaaatttttcatattgcggcatagtcatggtacgtaagtgaccacgtaatgcgggaatatcatgaatttcactacgtttactgatggtttgaaaaagatcttgctcaccgagataacataatatttgctcttcatgatgataaattaaatccccgctaaaatgttgaaaaaaatcatgaagttttaaagttagacttggactcatttctttagctaactggtgctggtcggttccgaaaatactcagttcttggttaatgagaatgtcactactttgccattcgcttaagtatggttcaaaaaagcgagaacgttgattacttacagcaatacctaaagctagtatttgaaaaataaaagcgccccataagtctttatgaatctcttttactatttttttatcgctgttctggtcttgaagaataggtaaattatttacatagtggtatttaaatagcaggacttgatgatctgtaatgccgtcattccatgttactgaagcaaactcggtaatttcattcgcttcattgcctcggttaaaaagtggaaagtgttgttttaatttgcttaagactaaaatgggttgggcttgtattggaagataagctggtaactgctgaaactttaggccataacgtaaagcagtcatatgctgttctaaataatgaataacttcagttaaaggtttttgcggttcatagagcaaataggcgaggaaaccagttaaaaatgcccataatagactccaactatattgaatatgaggatgaaaaaaatatccaaataatagcgtcgtaatactgcaaatacttaataaataagacagggtattcacaaaacgaaggttatgatcttcacgccatggatgtaatgcgtttaagagttcttgatcggtttgtgacttttgtccagcatcccaaagtcgggcaatattacgaaagacctgtgtattttttttacgtcttatatgaagtgcttgttgtgcggtatcaattggcatgaaagtaatgagttgattatcataaagtgctaactctagattatcttttaaattgaaagagataaatagaaatactaagactatttttattttaattatagatgctgggttaaacctcaaattaactaataagatttaacccagctttaatctttaaacttctaatttatcaatcagcattgcatcaccataactaaagaagcgatagcgatctttaacggcatgttcgtaagcagccaaaatattttctctatttgacaatgctgaaactaacatgagcagggtagactcaggtaaatggaagttagtaattaaacggtctacgatgcagaactcataacctggataaataaagatttgcgtatcaccagtccatgctgcgatttttccgccatgtgcttgagctgcactttctaaagcacgtgttgcagttgtacccacagcaatcactttattaccgcgtgctttagttgccaaaattaaatcaatagtttcttgaggaacatcacaccattcactgtgcatgacatgatttgtaatatcatcagtgcgtacaggcataaaagtacctgcaccgacgtgaagagtcacaaacgttttcttaacgcctttttggtctaactttgctaacaactcttcgtcaaaatgcaagcttgctgttggggcagccacactggcaattttttctggattatggaaaaccgtttgatagcgttcagtatcaatttcttctgcttcacgattgaagtaaggcggaataggtaactgaccatattgctcaagtactggcaagattggttgtgaaaactcaacgacaaataagttttcgtgacggccacgcacaatcacaggaatattgtcttcaccaacaaaaagctcagcccctgctttaggtgagttgcttgctttaatatggcaatatgctgtggtgtggttcagcatacgctcaaccaaaatttcaatcgccccacctgtggcacgttttcctttcagtcgagccttcatgactttggtatcgttgagtaccaataaatcgccttcttcgaacagatcaataatatctgtgaacatatgatcgtgatattggcccttagcatctaaatgcaataaacgcgaagcactacgtgtttcgagtgggtaacgggcaataagttcatcgggtagttcaaaggaaaagtcagacagttgcatatttgagaaaaaacaccgcaaaaattgcgcctagtataaactttttcgctttttaatggctgtgcttctggcctaaatcatgaaaaatgtttaaatgatctaaaagtgaacgataatattcacttagggtttgacaagttttgcaaacgcgctaatatacgcaacacaaacatacttcctctcccgaggtggtgaaattggtagacgcggcggactcaaaatccgctgtcagagatgacgtgtcggttcgagtccgaccctcgggaccaagattcagaatcttatgattctacgaaaaccccctaatctaacggcttaggggttttttgttgggtaatttttaattttctaaaaattttagttcaattaaagatgcacgtgaaacttattggtattcagaaattgttcctgaacaaacacggatagccaataccattaatgaatgggcaggggagactttagtccagtttaaaaattatgatgaaatgaagagttgattaatttaatgatgctttaatctaaattttctattttattggtacttcaatttaatatggtatctaagatactttatgttaaaataaaacaataaaaattttattattagtattggttttttatggataagaagtttggttatattgttattgcaataactatttttatatttgtgattttcgtatatggtctattccgtaattttatagaagtatctgataaattagattttacacctttaaagtatattgttggttttgtgttgacactagttatactggtatcatctatttcctcatatttggattctaataaatctagttctatggtcagagaaaaagaaaaataaagcaatataccgaattatttaataaaagtattgaagaggggtattacccatttagtgagaaaaataataatattaatatggaggaggtaactaatgaaattagaaataaaatagaattagcttctacagaaagctattttaaagaatttaaagataaagtaagagttgaagccatagttgatttttttatacaagaagctaagggcatagaaacaagagtaaaaggagaaatcaacaggttgtctaaaagtgctattattaatttgtcactaggaatgatgcttagtattggagggatattgtatctaggaaattttgttgtaaatgtacaaaattttggtagtattgaagaaatgattataaatacttttcctaaagccatttttgttttacttatagaagtttttgcgtattttttcttgaaattgtataaacaaagcttagatgatattaaatattatcaaaatgagttgactaatattgagtctaaaaatttagcagttcaaattgctaaacaatctaacaatcataaattaattactatatgtattgaaaaactcttaggtacagaaagaaactttattttagaaaaagaccaatcaacaatagaaatagaaaaagagcgtatcagttctaacaataccaataataccttacaggtactgaaagatattttaaaaaaataaaaatcaaaactaatattgaccctgcaaagtatctaagctacatcgaatttactactctactttagtggtggagattggcatctgacaaagaacagacagaaagaccgctgctaaagcggtctttctgtctgaaattttattattatctttaaggggagaataatgtcactaaattagcttatatcggaaattatccctcaatcatatgtacatatttatgccactcatcaattaaatcttcggagcatttattagtagggtaataagcattcttacattctttataatcatttcttgacgatttaatgtgctctatatagtaaaaaaataaatcaaataaagatgaatttccattaaaagagtaaacatgataatcaagatagtcacaaagcttagcagcttcacttcgctctccgctcctatttagagcgtattgacgaaatcttatttgatggaaattaaggtgtaattcatagaagtgttcaataaaatttatctctttatatgtttcaattaatctcatttcagaataaattaaaaataaaaaaagaaataatttctttcgattgtctaaattttcttttaataatgaaaatttattaataattcgtataagttgtcgtgggttgggagaataaatttgacataaattcatgtaaatatgaatttcagtatgatcaagtaatagctgaaagtcctgattatagttttttaaaatttcagaatatctattgccatctaaatctctactttttaacattatagaaaaatcaataaatttttctaaataattagctgtatttgagaatccataaaagttattgatcgattcttctagttgagttttattaatagcaagaatgaatacaacttttgggatatcaaaaaaatgtttgatgcgttcaataagacgaatcgcaaattctggcttacaacggtcaagttcatcaacaataaatactaaaggtttatctaatttagacgttatttttgctaaagcttctttaaagtattgtaaggattgcttttctttatcgtagttttcaacttgtgctgaaagatgctcttgtagtttttcattgagaagttttgcagcttcttttccaaaatcatcagcagttttaagtttttctacggtttcagctacaggtttagccaaggcgcccatacctacaagtgatgtagtaaggtaccaaagtaacattggtaagttaggaagaattgctctataagcttttcctatagtttctttaattgtatctatgtttgtttcttcattttcgagacaattagcaatttccatggaaatagttaaaaaaggatcatcaatataatcttgattaaaagcattcaaataaataactttaaaatcgttttgttctaattttgctttccaatttttaacaaaccaggatttacccgctccccattcagcgtcaatagcaatagttgccccaacagttatacgtgagacatgatctgttaaacgacttgctaatgcttcacgtccccaaaaatcattttcaaatggtatttcaattttatcagaaatgtctttaatgagtttataagaggtatcttcggaattagctgcgatattcaaagttttaagcctattatttattattgacggctaatagtatctaagctactctaaatttaccacccacatggtggtcgagtttggtcgctcgtttagaaacatatggtagacaaccgctactagcggatttttttttgtctataattcggtgcacccgttgttatggtggatcggatggggaggctaacgcctgccgttttacctgtgtttcacggtcgaccaaccccgttcggtctgccaccctagtttggtcgctgggatggcatagaaaaaccaaacacaggtgaatagaactatgactccattattaaaagctggtaacaagccagccagtccagaagacttacttcaaacagtcaatgactctctttctaaactagaacactacctatcagctctttcacgcatgcactttgacaatgacctaacaagtgatgagttcaacgccatcatgtgtgggttacaccttcaggtccacgagatctgccagcaaatcaaagcctgactaaaatctgaggggaatgggccgaagttgctcattctccttcagcgcgggcggttgtccccccaccacacctgggcagtaaatatgtcgaatactctacaaaaattcagtcacccacaattgtgggtaaaacggctgtagataaggcctactttcgagcaaaacaccacaaaattgattctgcatttttctacacggttacctcaaatttctacagaaagaaaatcattgaaaagtcacggtcaaaaacaggctttttaaaatcaaaataaaaaatctgaaattaggtaacacacacctaaaactatacttaagcacatgaaatatttaagaaaaagttgtcacaaagaaaggtaacattagggaacagattaggtaacacagtcattaagttattgataagtataaatatatttagtaacgctctgttacctgaaaagtgggtaacttgttgtcacctagatgtcacttaaatgtcactttataaaattaataaaaagattatattattcatatatttaaatactattttccaaatctgttacttttgttacctgatttttttgtcattagaaattttgagtttccatcaatttagcacttcttctgatgctttataaaaatcaccataaatcgtaccttcttccacatttacccacatatttttgattaaacctctgttattaaaatcttttcagaccccgaccctcgggaccaagattcagaatcttatgattctacgaaaacccctaaactgacggtttaggggttttttgttggatataaaaagttcctagactttaagaaattatgagctacttgctttggttccgagggtcgggatcaaatcgcttataaatttagagctattaaaggttttttaatttttcaattcaagcagactttatttaaatatgaaatgcatttgataaaagcaaaatttgagtcgaagttaaggtttcatattttataagatgatttaagctaatttttatctcttttctagctaattttgacttcctatttcttattacttacaactctttctttcaaaaaaattgttgtatttttctaaagcatacccactttatgtatctgaaaacctttaattgaaacttcacatttctatttcgaaaagaaagttgctcttttaatgtactgtgttaaagtttgtagtagatcataatgattataagtacattcttcaaaagagcggttccgaccaacaatgacaaaatctgtgaggcgggcatgacacagcgattagaactacatcaggtagagcagttaacagcttgtaaaatatcactattacttggattaaatgccgagcagaattatattgagcaatttttccggtttagtcttcgcctgttgaagtgtcaaaaagctttgcttacttttaatcaggaaccttatttttggcatcattgcccggatggcatgactgcaatttcctttaaaccttcaagacacctaaaacaatgttttgctaaacaacaggtgattcatcacaatcatccttcttatcaaaatttaatcaactatttaaaagagctaaatattgaatgtgggcgtgccttagctgtccatttagtgcagcctgatcagacctctatgggatttgcagttttcttcgatgacgatgaaacttgttttgaagatgatcaaattcagttgcttctcgattactgttctagctttatgcaacaagtcgagttgaaatttaattatgaagaattaaatgaactctatgagcagcaagtcgcgctgaactcgagtaaaacaaagttcttttctattatttcgcatgacttgcgggcgccgtttcatggcttgttaggtttctccgaagtgttagctaaagaacgtgaaacactggatgagtcgagtattcaaaatattgctgattatttatacgacacttctcaatcgacctataacttacttgaaagtttgctgacatgggcaatggccgaaggtggtcgctttgtttatcacccaattaattttaagcttagacaagtgagcaatattgtttgtgatgtgctgcatactttggctttaaagaaaaatattgaattggtaaatgcggtttccgaagatttaaaaatctatgccgatatcaatatgatgacttccgtgatccaaaacttggtgtcaaatgcattgaaatttaccgatgttgacggttctggaaaagtattcattgaagcgaagcaggtgggtacaaatgtcgaaatcactgtacgtgatacagggcttggcatgactgaacagcaaatggcaaatttattccatccgcgtattacggcaagctttaaaggcaccgctggggaaaaaggtgcgggtttaggtttgagcttatgtaagcgttttgtcgagattaatcaggggaaaattagtgtaacctcccaaaaaggagtgggaacgacatttaaagttttattaccttctgctcaagaagttcctgaacatcatgtagaacaacaaaatacatctgaagcaaaattggtttaatcccttttcctactactacttgaactgctataactaaaaagagagtctgaggaaaagagcttttttatatgaatgcggagcagttacaaaaaacattgcgtgccagccaatatgctgaacaagttttaggattacatcaggctgttttagaacaagattatcaaatagatcaatttgctgcaccgctctcaacagaacaaatttaccaacttgtagacatcacgcttgatggaattggcgatgaaataacttggatgcgtgcgcttcgtatactgcgcagtcgtttaatgtttcgctggatctggcaagatgccaatcaactgacggatgtcgttacacttactcgtgaactttcagactttgccgatgcaagtatttgtgccgcaaaggcttttgctcgtgttgcattggttgctaaacacggcgaaccattaagttattcaggcaaagttcaagatttgattgtggttgccatgggtaagcttggggcacaggaattaaatctatcaagtgatatcgacctgatttttgcctttgatgagcaaggcgaaaccaacggtcgtaaatgtattgatgtacagcagttttgtattttgtggggacaaaaacttatttatttacttgaacatatcaccgcagatggttttgtgtttcgagtagacatgcgcttacggccttggggagatggctctgcattagcgattagtcatgcagctttagaaaaatatttaagtcagcatggccgtgaatgggaacgttacgcatggattaaggcacgcgttgtcactgggggtaaagaagggcaagacttattagaaatgacacgtccttttgtattccgccgttatgtcgattacaccgcttttgctgccatgcgcgatatgaaagcgatgattgagcgcgaagtattacgccggcatattgaagatgacattaaactcggggcaggcggtatacgcgaaattgagtttattgttcaggtgttccagcttatttacggcggttctaaacgtgagctgcaagaccgtcaatgtttagttagtcttgaacatattggtgaggcaggcttgttagaaaaacaggccgtacaagagcttgaagatgcttacctattcttacgccgtgttgaacatgcaattcaagccttgaatgatcaacaaacgcaactattaccagaagaagcagatttacgacaacgcattatagatactttgggttttacgagttggaatgaatttattgatgttcttaacgagaaacgccaaaaagtaaaagttcagtttaagcagctcattgaagacacaagttccaatgcagctaccgagaactttggacagttagagcagcagctagatgaagtgttagatgataatgcaaaaaatctgattcatgagttctggcatggtcatgcacttaaaaaacttccttccaatgccgtgcagcgtttaaaaacattttggccccatttaattgaagccattttacagtctgaacaaccacaaactgcattattacgtttaatgccactgattgaatcagtcatgcgtcgaaccgtctatttggtaatgctgattgaaagtaaaggggcattacaacgcttagtaaaaatggcgacagtgagcccgtggatttgtgaagagttaacccaatatcctgtattgctggatgagttcttgtcgatggactttgagttaccaaagcgtaaggacttggaagactcattacgtcagcaattacttcgtatcgaaattgatcaggtcgaagatcaaatgcgggtacttcgcctatttaaaaagagtaatgtgttaacggtcgctgcaagtgatgtgttagctgaaagtcctcttatgaaggtctctgatgctttgacagatattgcagaagtcagtgttaatgcaactcttaatttagcttatcagactgtagcaaaacgtcatggttacccaaaagatgtcgagggaaaacgttgttcactcgattataaagcctttgccgttattggttatggcaaggtgggtggcattgaactgggctatggttcggacttagatcttgtctttattcactatctagatgaacaagccgacacggatggtactaagtcaataacaggttttgagtttgccatgcgtgtcgctcaaaagtttatgtctttaatcaccactcaaacgcttgatggccgcgtttatgaaattgatacacgtttaagaccttcaggtgaggctggtttattggtgacaagcctgaaagcctatgagcattatcagttgaaaagtgcatggctttgggagcatcaggcattagttcgtgcacgttctattgcaggtgatgaagcgctttgccaaaaatttgaaatatttcgccgcgagatattgactcaatctagagatgaggcttatgttcgtgaagaagtgctgaaaatgcgtcagaaaatgaaagaccacttaggttcatcttctgaacaaaaaaaacatggtatttttcatttaaaacaggacgcaggtggtatcgtagatatcgaatttatggcacagtatgctgtacttgcatggagcgggacgaaacccgatctcgcccattattctgataatgtaagaatattagaagatgctgctaaagcagactgcttatccagtgaagatgccacagcattaattcgagcctatcttagtgaacgtgccgaaagccaccgcttagcccttgcgaatcaatccatgcaagtaagcgcagcggactggcgtagtacccgtgcggtcgtttgcaatttatggcaaagattaatagacccaaccgcctcggttgagttggatagtgaatgattttataacaatttggagtgttccatgaatttggctgatcgtgatggttttatttggcaagatggacaattaattgattggcgtgatgcaaagattcacgttttaacccatactttacactacagtatgggtgtgtttgagggtgttcgtgcttatgaaactcctaaaggtactgcaattttccgtcttcaagaccacacaaaacgtttgttaaattcagcaaaaatttatcaaatgaaagtgccgtatgatcaagcagcgcttgaacaagcacaaatcgatgttgttcgtgaaaataaattagcttcttgctatttacgtccactgatctggatcggttcagagaaacttggtattgcagcaacaaataacactattcatgccgctgttgcagcatgggcatggggtgcatatcttggtgatgaagcaatggtgaaaggtattcgcgttaaaacttcatcatttactcaccaccatccaaacgtgaccatgtgtaaagcaaaagcatctggtaactacacgttgtcaattcttgctcaccaagaagttgcacattctggttacgatgaagcaatgcttatggatccacaaggttatgtgtgccaaggttctggtgaaaacgtattcttgattaaagatggcgttttacacactccagatattgcgggtggtgcacttgacggtattacacgccaaaccgtgatgacgattgctaaagatcttggttatgaagttgttgagcgtcgtattacgcgtgacgaattctatattgccgatgaagcattcttcacaggtactgctgctgaagtaacaccaattcgtgaatacgatgaccgtcaaatcggtgcgggttgccgtggcccaattaccactgaaatccaaaagactttctttgatgcagttcaaggtaaaaatccaaaatatgaacactggttaacttacgtaaaataagttaatccgttaacatgaaaaggcgaacgttggtttcgcctttttatttttgggttagggagcttttatgcatattgtctatgtctctgatggtaaagcagggcatcgctcacaagctttaggcttgtttcaggcgatgcaaagacagcaggcaaatgcaacttttgaagaagtctctattaatgacttgcctgttatgtccttaatcaaagcgcttttttcttcaaaaaaatctctatttcaacaggcgcccgattttatatttggtgttggaagtcatacgcattttcgtgtctggttgctcggtaaaattttcaaaaaggctaagaccattattttaatgaagccgagtttgcctattggttgctttgattatgctgtgatgccagagcacgacggtattcctgcgaataatcgagtgattgttacgcgtggggcattaaatcctattcgtaatgaaaaacgccatcaagcttctagaattttaattgcattaggcggttcgtcaaaacggcatcaatggaaccaagaaaaagtattattaagcgtgcaaaagattgttgagaataatccggatgccgaaatcattctaacgacttcacgtcgaacaccagcagagtttattgatattttaagacaacaaagttttgcccagcatttacaaatatttccggttgagcaaacacctcaaggctggatttttgaagagatgcaaaaagcagaagctgtatgggtaacagaagatagtgtttctatggtttttgaagcacttaccgcgggttgtcgcgtaggggtcatagcaatcgatcggttgaaagacgatagaattacgcactcgattgatcaaatgatagaatcacaactaatttcacagaatacttgtgtcgtacagttgccacaaccttatgcttttaaagaagcagaccgtgtagcaacatatcttttagcgaaaaattaaattttttattttgagtaaataaatgaaaatattgcatattgcaaattttggctttaataaacaaggcgcacatttttactgcacagaccgtaaaatttctgccggattaattgaaaatggccatttcgtttatgattttagtttccgtgacatggctcgaatgggaacaatctttaaaaccaaaaaattaggggcaaagtgggccaataaagaagtactcaaagttgttaataatattgaacctgatttggtattgattggtcatagcgatttgatgagtccagatgttttaagacagattaaagagtcttaccccaatactaaaattgcattttggtatgttgatccgctttatcttgaaaacaaactcgactttgtcaaagcattttcaccttatctagatgctattttctgcacaacaggtggagaatatctccaaaagttaaaacagcctcatttaagtgtggcttatatgccgaatgttggtcatcgcaatgtagaaacactacagcaattttcaaactcaaaaactgacaaaacttttattttctgcggtgttgtttataaagagcctgagcgcgagaaattcttaaaagatttagcagaggctttgcaacaaggccatgtaaattatcaatattatggttgttttgaacagccaggtgtatatggtaaggcttattataaggttctgtctgaaacaaaaatggggctcaattactcacgccgtaatgatgtaaccttatatagctctgatcgtattgttcagctgactggtaatggtttacttacctttagcccaagaattccaggctttgagaaactctatactgagcaggaagtggtttactttgatgatcagtttgacttggccaaaaagatccaattctttgatcaaaacccagagcaagctgtaaaagtagcgaaagagggctgggagaaaacacgtaaatctttcaatgctaaacgcatcacccaatttatggttgaggtgacgtttaaacagcccctttcagaagattatgaatggtcacatgaggtttatgcatgatgtggtttttgtacgttgcggtgggcctgctagcacttgctgcactgttatatgtgctgggtaattatacattctggcttccgtttcgttcgagtaaactacctcgcattgtgatgttacatcaggtcacacctaaagatgctgcttctggtatgaatatgcctcctgaaaagtttgaacaactcttaacgctattaacgcgtaaaggggctatcttttgctttgtttctgagcttgaacaatatcgtaatcaaaagaatgtggttgctttaagttttgatgatggatttatggataattatctttatgcctatccactactaaaaaaatataacgcgaaagcaactatttatttggcaacgcaaattgaaggtattgaaaagcttactcatgagcaaatccatgaaatggctaactctggtttaattgaatttggtgcgcatactcaacatcatgtgaacttacttaaacttgatgaccaaaccgcttatgacgaaatgcttcagtctaagcgtgatgttgaagcattagttgggaagtgcccgagttttgcttatccatttggtcgatttaacgaaaagcaccagaaaatggcccaagagattggctttaaaaatgcagtatcgactcgtaaaaaaatcgaagcatatgaagcagataatcaatttaatattccacgtgtcagcacgcatggtgccatgaatgctttacagatgcgtatcgcccttgctaaaggacgttataagttatgaataaaattccatgtagtgtttatattgtcactttaaactgtggtgcttggttagagcgaactttacaaagtgtcagtgagtttgatgaagtcattattttagactcgggcagtactgataatacttatgaaattgcaaagcgttttgaaaatacgcaaatttctcaccaagactggcagggttatgctgggcaaaaaagtttagctttagctaaatgcagaaatgattgggtacttaatttagatggggacgaagtcttatctgaggagttaaagcaagaaattgttgagaccattcaacagaacaagcttgatgcattaatcaccccaattaatgatgtatttttaggtgttccgaacagtaaacatactaaaaaacatgcaaaagtgcgttttttccgtaggtctaaagggcattatgaccttgccaataaagtccatgaaaatgtgatcgtagatggtgaatctcaacgtgctcaacacgatatttaccattatggtgagtcgagcattttcgttaaagtcgaaaaaaataaccaatattccaacttaaaagcattagagaaataccaaaaaggaaagtctccaagcattgcaaaattggttttggtgatgccagtgacttttatgaagtcttattttattcgccgtagcttcttaaatggttggcgtggtttcgtaaatagtatgattaacgcattttatgcatttctaaaagaagctaagctttttgaacagaccatgaataaagataaaaaataagtaggcaagctatgaaaattgttcaggtattggcaactagcggtggagttggtggattagagcagcacacttttaaccttgttaatgagcttgctttaaaccatgaagtacatgtgattgcacatccttgctatgtagacaagtttagccaacaagtacattttcatgctatcgattttgcccgtagtcgttggaatatttttttactttggcaacttaaaaatcttattcaacaaatccaacccgctattgttcatgcacaagcaggaaaagcggctgagttgattgcccgcattaagccatttttatctggtccaaagtttgtaacgactgttcatggtactaaaaagaataagtctgcttatttagcaggtgatgcagttattgcggtgagccaagcgctcacgcaaggcattccagagtctaaagcacacgtagtttataacggggtatatcctcagcccgtacttacaactgaaaataaagaaaaattgcttcaatcgattcaaaaagattttactgagctagacacaagcaaaaaagttgttatgtgtattggacgtctagaaccagtaaaaaatatcagtttattgattgagtcgatgcaacagattgatgccaatttatggattgttggtgacggttcacttcgagcaagtttggaaaagcaagtcagcgaattgaacatgcaaaatcgggtcgcttttcttgggtttagaactgatgcgcgtgatctggtacaactggctgatatcgtggttttatcatcagatcgtgaaggttttccacttgttatggtcgaggctttacaggccgataaagcaatggcttcaaccaaagtgaacggtgtgatcgagtggttgccagagcaatatctagccgaaattggagatactcaaggtttagcaaaagcgattgaatatgcccttcaatctgaggctcaaaatgacttcagcccactatatgcaaaggccaaggctgaactgactgtaccagccatggctgagcagacgcttaatatttataaaggcctgctgaaaacttaattattttttggtgtaaggcggatggcatcaagtacgacgaaattatcttcgaaattaatagtatggcaaccgtcatctgcttgattccagtctggtaaaactacttctagtaatttttcttcataagctgctggactaagctgagtaatcgcttttaattcgatattgccgccataacgttttaaagaatcttggcttggccgaaccagttgccctttgtaaacaaaaggtttgcccgccatacggaactgctgacttcctcggcacactgggttcattgggtgctcttgccagttaggatttaaaatatcttcggtaaagaacaaatctaaacggtcaccaaactttttacaatcacgacgcgttgaggtaaaaagataccataagccctcatggtaaaaaggggtgctatcaaccgcttcaatattttccattaggttagaatgcttctcccatttcattggaaaatcagtacatttccagagttcaatagttttgttggcagaagactctggaatcatgtaccaagtgctatctattttaaatacgcaaggatatgagaggtggtaatcgagttttaaaatagtttcgggcggggtgtaagtgccatccttaaagacttctaaaactgaaagaaagcccaccggatgttgatcatccacctcttcaaagaaaataaaatgtcgtccattttcatgagcataaaagctatcggcaaaggtaaactttccaggagaatggatttcaaagagagaatctaattgctcaagtgttgtaaaaggttgttctaaccagccaaaacgcatataccaatgagagtcaaaagtttttgctttttttgcttgttggtacttgtaccattttttttggattaggcgatttagcattaaattttacactcgatataactataattagatagactatccctgactcattttaacatttgaatgaaatgaaaaaatatttaatcagtattgaatctacgaatagtgaacgtttaaaaaagttgttctctcaagcaacattttataaatatcgagatgaatttaaacaatttggggtaattgggaaaaatttaagtgttagtgagtattttcaacaaggggtagcaggcaagaagaaaccgatgacgcctggtgaactaggctgtgccatgtctcatattgctgcattaaaagattttttaagctctgatgaagaatatgccattatttttgaagatgatgtaatcgaacgttttgaaattgattttcaagatttagaaaaactcattcgttctttgaattttggtccttgctttttcctaagcttgggcggtattcaaatgaaaatatgtaatcgggttcgaggaaaacttttacctgaagaattgtataaccaaaaaattcttaaagtggattacgattatcttgaaaaacttgcttatgcttatgcatatgttgtagatcgtaaaatggcacagatgttggtcgactatcatcaaccgataaaaatttacgaccattggcaagaccttgtagggcgtggtgaatttagtttttatgtcagtttcttattcgatcatcccattattgagaacaatgatgctttaagctatttggagaaggaaagaagcttagtcggttcgcattctcaagacgatagtgattttttgcgataccttagagttaaattaaagaaatatatacttaataaatatataatttaggtgtctctttcgtttttattattaattttatggttaagcaaaaaaatattattattgggtcagctacaggatacaacgctgacctgatctcttcttttgtatattctttgggaaagacagactttgatggcatattgactttaattatatataaagagcaaatgacagagtttgtgaatgcattctcagacgtcaaaaattttaaaattgaatttaaagtttcaactattggtaaatttaaatcaaagtcaaagtattcaggtatttataaatataaatttgtgaaaaatatctttaagaaaattattgacttaaccgtaaacgaagaaaaacccgaaacaaagataaaaggccttaaaatcacaggttatcctcatgtgagccgtttctttgaatataaagaaattctagaaaatcatcctgatgcttcacatgtattgctaactgatgttcgagacgtttttttccaaagtaatccttttaagaatcttagcaaaggtttatttgtcggaatggaaaatccagactttacgataggtactgagcaatataatcaaaagtggattttggatgcatacggagagagtttttataatcttgcaaaagatgagcaagtctcttgttctggcgttactattggggatcatgaatcaattaaagtctatatcaataaaatgattgaagaattctgtaaacagccatatcagaaaatgtctaacagaatttatgatcaagccatgcataataaattattaattactaatgagttggcagaggtaactcgttgtcagccatttgaatctattattgtaactcttggattatatccaatagagcaaatttctattaatgatcaaggttttattattaaccgtaaccaagaaatcattcctattgtccatcaacatgacagacatgcggaactgattcagttatgtgataattatattggaaaataaatttaagattttctaaatgttaggtcagatgcggatattaatttttatccgcatttccttttaagaccatataaatcagcgcaacaaaaataagtaatgcaccgactaaactacttacgcagaaataaagaatacgttgatttgttgtaaggttaaataattcattcgcaaggatatagcgcatgaaaaaccattgtgcgagagaaaatacaatcacgactaaagcatgtcgacgaacgtcaggacgcattgccataatcaattaccatgggagaaagagaacagttattatgccatttgcctactatcatctcaatagagccttaattaagctaattgcatagaaaaattaaaattatggagggattgtgaagttttattaacattaataaaccatgatttccttttttatagaattttatctagtaaattactgcatttatttggatagatgtttaatgcagccgatcgattttgtaatgatttgggtggactcaaccgatacgaaatggcagcagcaatatatatattataaatccaaagaaacaaaaaccaagattgatgagctcgttgatcaatgtcgttatcgtgactggaataatcttcattactggtttagatctgttgagaaattctgtccttgggtaaggaaaattcatcttgtaacctgtggtcattttcccgaatttttagtcaaaaatcatcccaaattaaatttagttactcatgatcaaattatagaacctcattgtttgcctacgtttaattcacatgcgattgaaatcaatattcataaaatagaaggcttggcagaacactttgtttattttaatgatgacacctttattaatagccctttagaaccagagttcttttttaaaaatggtttaccttgtgatggtattcaattacaacctttgatggtggtgggggaagagaactttttaggcgcagttgctttgacggatgtcgcaattattaataaatattttgataagagaaaactctttcggagtaatccttctgcactttttaatcatcgatattcgataagtaataatttgggcaattttttaagcttatataatcgaaaattctcaagcttttatagtactcatttaccccaaccgtttctaaaatcggtgtttgaagaagtttggagaaacgaagagagctacttaaaagaagtatcaagtcatcgatttagacaacctttagacgttaaccaatacctatttcgattatggcagttatgttcggctcgtttttacccagtaaatatatttcagcgtgggcagaactttaatttaagaatacaaaatcttcctgaaattaatcatgttattaagaatgagcaacttccacaaatttgtctaaatgacgatgaacacgtggttgattttgaaaaattaaaaacagaaattatccaaatttttgagcaaaaatttaatacggtttcgagttttgagaaaaagataacacattaaaattttcttaataaaaaaccctgcaattgcagggttttttattaaagagcaattaagcttctttcttttgttgttcacgtaagcggatgcccaagtcacgaagctggtttgcttcaacaggagccggtgcttgagtaagtggacattcagcagttttcgttttagggaacgcaataacatcacgaattgaagtcgcgccagtcataagcattactaaacggtcaagaccaaatgccaaaccaccgtgaggaggtgcaccgtaacgaagcgcattgagtaagaagctgaatttttcttctgcttcttcatcggaaataccaagcgcttcaaaaatcgctttttgcatttctaatgtgtaaatacgaagtgaaccaccaccaacttcagtaccgtttaataccatgtcgtaagcaacagaaagtgcttcgcctggattgctcttcacgtcttctacgctagatttaggtaatgtgaatggatggtgaacagaagtccatttgccatcgtcagtttcttcaaacattgggaagtcaacaacccaaagtggagcccactcacaagtcgcaaggttcaagtcatgaccgatcttgacacgaagcgcacccattgcatcatttacaattttagctttgtccgcaccaaagaatacgatatcgccattttcagcgccaacacgttcaagcaattgcattacgattggttcgatgaatttaacgataggagattgaaggccttcaattcctttttcgatttcattgactttaatgtatgctaagccttttgcaccgtagataccgacaaatttagtgtattcgtcaatctgactacgtgttaatgaacctgcgcccggtacacgaagtgctgcaatacggcctttagggtctttagctggacctgcaaatactttgaactcaacttcttgcattaagtctgcaacatcaacgagttttaacggaatacgcaagtctggtttgtcagatgcataatcacgcattgcttcgctgtatggcatacggcggaatttttcaaattttacgccaagcaagtcgttaaataatttaacagtcataccttccatcaaatccataatgtcatcatcgtttaagaacgatgtttcaatgtcgatttgagtaaattcaggctgacggtcagcacgtaagtcttcatcacggaaacatttcgcgatttggtagtagcgatcaataccaccaaccatcaacaattgtttgaataattgtggggattgtggaagggcatagaagctaccattttgtacacggcttggtactaaatagtcacgcgcaccttcaggggttgcacgagttaaaattggagtttcaacgtctaagaaaccatgatcatctaaatagttacgaatcaagttggttactttagaacggaagcgtaaacgctctaacatttctggacgacggatgtccaagaaacgatattttaaacggtgttcttctgacacgttaatagtgtcatcatttaatgggaatggtggagtttcagatgcagcaagaacttcgatttctttgcctaaaacttcgatttgaccactcaccatatttgggttttcagtaccttcataacggcgacgaacacgacctgtaatttttaatacatattcagaacgtgctttatctgcagttgcaaatgcttctggagtatctgggtcaataaccacttgaacgagaccatcacggtcacgcatatcaaggaaaataacaccgccatggtcacggcgacgatgtacccaaccgcataatgtaacggtctggtcgatttgggcttcagttaaagagccacagtaatgagttcgcatcatgatgaagattatccaaactatattggctgaaaagacggatgcgtaaaccgcgcaccgtcaaaaaataagttttcgattatgccctgttgaatggcatgccacaagaactagatcaaaaaacagctataatttagctaaaaatgagcaatttggcagcaagtttagctatttagcccattctttgttgtcgatctaaaaataagaataatagacatcctaaactaaacgtacttaaccaaccttgcataaactcattaatagagcggccagtaaaataataggtatcagaatgccaaacctcatggggaatataacgggcatagtcccaaaatgaaaataagcctaaaagtgtagataaagcaaataaacaccaagcaaaaattttaattttataatttactttccaatgctgtttatggcgctgatagtactgaatactcatccagcctaaaaaaggtaatgccagagcagaagaaccgagttgaagaaggcgatgcaatggataagggcggccaaacaagtgaacagtttgcgataaaaagtcttgaaatataaaagttctaaagtctgagtgggtaagcccatcccaaatgagatgtgttgctataccaatgagtagagcaattatgattccaataaaaaagctaaaaaaaagtctaaaagaatctagttttaaatcgtgttggataccaaaaaaacggtaaagcacaggtcggtaaagtaaataccaaatggcagagaataatagccctaatgcaaggttagggtagaaaagccccttccattgatgagtcagcatacctgattgcattgtaaataagcggtaaagatcgggcgtcatactgccaattgctaaggcggcaatgggcaacgtgtttcggctcaatttagcaagtggaggggcgataactgcatgggagattgtaaaaggcattagaaaagaaagcttctcacatcatcaaaaagttgagtctatcgaaacatgtcattagcgaatgttttttattgcaaaacaactgaaatgttataatataacaaaacaaaaggcgtacgattagagactcacctcatgttgttctataaaaatattttgaccttatccattttggctgccatatccatacctgtatttgcagcagaaaatgaaaatgttgagaagttagaaactatccgcatcaaggcacacccacttgagcaaacttcaaaagattttgcagtcgcagatactgtagttgaccaaaagcatttgactgaaggggctgccactattggggatgcgctcaatagtgaggtggggatttatgcgaatcagtttggggctggttcaagtcgcccagtgattcgtggccaagatgggccacgtgttaaagttcttcaaaattcatctgaaaatgtggatgtctcaactttgtctcctgatcatgctgtaacagtagatccagttcttgcaaaacaagttgaagtgattcgtggaccctctactttattgtttggtgcgggaactgttggtggtttagtcaacgttattgataacaagatccctacacaaatgcctgaaaatggttatgaaggacaagttggcttacgttacaacactggaagtgatgaaaagctggcgagtgctggggtaactgtagggttgggaagccaagttgcattacgtgttgaggggttaacacgtgatgcgaataactatattgcaccaaactatattcatgaaggtgaaaaagagcgccgtgtagacaatacctttgcacaaggtgattcagtgaacgtggggttgtcttggatttatgatcgcggttatacgggtatttcgtatagtaaccgtcgagaccagtatggtttaccggggcatagccatgaatatgagacctgtcatattcatgatctaagtttacattgtggagaccatgaccatgaagggcatagtgatgaagaagctcatgaccacgagcatgaacatggcggtccatggattgacttaaagtctgagcgttatgattttaaaaccgagttaaacgatccatttgcaggcttccaaaagttacgtgcccaagcgagctatacagattatcagcatgatgaaattgaagaagggacaatcgcgactcgattccaaaacaaaggttatgatgggcgtattgagttagtacataatcctattgctgattgggaaggggtaattggtacccagttaggccaacaaaaactaaatttaactggtgaagaagcatttatggcaccgaccactaccaaaaagtggagtgtttttgctttagaacacaaacaatggaaggatgttcattttgaactttctgctcgtgcagatcagcaagaaatcgatgtagatgataactctaaacaagattttgacggttctgctttttcttatgctggtgctgccaactgggagtttgcgccaaattataagctttcatttgtagcatcacaccaagagcggctacctcttgctcaagagttatatgcaaatggtgcccattttgcgaccaatacttatgagttaggaaatgatcaactcggtaaggaaaaatcaaataatgttgagttaggtttgcattttgatcatgacaaacttgattatcatcttcatgtttaccataactggtttgatgactacatctatgcgcaaactcttgaccgttataaagacttccgtttagttcaatacactcaagataaagctcgtttctatggtgcagagggtgaaattggttatcaaattacgccaatatacaagatcagtgcttttggcgattacgtgcgcggtaagattgatgccgagggcaatgctccacgtattccggctggtcgtttaggtactaaagttgatgcagattttggtgatggttttagtggttctgctgagtactatcatgtctttaatcaagataagattgcggcttatgaaaccgaaacagaaggctacaacatgctcaatttaggggtagcatactctggacaatatggtgcaaaaacagattatcgcgtttatttaaaagcgaataacttgttagatgacacggtttatcaacatgcgtcgttcttatcaaatatcccgcaagttggacgtaactttaccgtcggtgtagattttagtttctaaggcttcaacacgaaactaaacttgaaaaatcaagccaaaagacctaatttgaaactatcaagttaggtcttttttatgcgtatttttcagcgaattcatcaaaagttaaattggtcaggacgtcgttatatggcggtcatactttgcgttgttgctattgcatatcttgcatcggcaatttatcacacagtgaaaccattgccgcaaggaattaactttagtggcaagctcagacatgccgatgttaaatttttagccgataaaacgtatattgatgcgaatgggcaacaacaggttgatcagcacatctttgatgaaatcttgaaaatgattgatgaggcaaaaaccacaattgtggtggatatgttcttgtttaattcagaagtgggtgactcgaaactcaagcaaagaccattgatgcaagagctcactgatgcactaattagtaagaaaagacagaaccgccaaattcagatcgttatgattaccgacccgattaattcggtatatggtggactaagccctgaacactaccgtcaattacgccaagctggtgttgatgtcatcgaaacgaatctggcacctttacgtgcttctaacccattctggtcagggttttggtacatctgttgccaaaatattggcaataatccagagaaaggctggttacccaacccatttggcgatgaaaaaattacgctacgtagttatttgaacttatttaactttaaagcaaaccatcgtaaaactgttgtcgttgataccgatgcgggttggaagtcattggtgacctcagcaaatccgcatgatggtagttcgcgccattctaatgtggcattggtggtaaatggagccacagctgctgatgtacttcaaaccgaagctgctgttgcgcaaatgtcaggaagtagttcaccatcacttattttaggcgattttgaaaaagacgttagcaagcctcaaattcaagtgctaactgaaggggcaatctatgaagctgtattaaaattaattaatacggctaaacctaaagaacatcttgatttaagtatgttctatttgtctgaacgtaagattattaaagctctaaaaagtgcccaagaacgtggcgttattgttcgtgttttactcgatccaaataaagatgcgtttggtagacaaaagaatggtatcccaaaccgtcaggtagcgtcagagttacatgctgctggcattccaattcgttggtgtgatactcatggcgagcagaaccatagcaaaatgatcttgaaatataatgctcaacaagctgagttaattgtaggatctgccaattttacagcccgtaatttaaaaaattataaccttgaaacggatatgttggttgtaggcaaagttcaagatcaagtctttaaagacgctcagaattacttcaatacttcgtggtcaaacctacaaggtagacagatgagcgtggattatgcgaagtatgccgatgagtctaaagtgaagtattggatttatcgttttatggaatggtcaggattatcgactttttaatcactatcttgaagttttccaaaaagtagcaaggtgattgccgacatgaatgtcgccgtttcactgtgttgcagggaagcaacatcagtgaaacaaaggtttttgtcacttttgacctctcaaaagtgaggcattagcttatacaaaagacattcaaatattattgtaagtaagggctgtgccataagtccgagttaaggcgtaggcggaatcaattgatccaaagccttatcatctaacttctctatttcactcaaatccgtcttaattttccactgcgactcatcatctacaggattcggcaaacgcgcttcaagccaatcacaaaccacatctggagaaaactcagggtgattacactgaataacccatgataaaaaatcttttgcttcaccattcatgtaaggtggtggagatacaggaaagaataaagtaggtaaacgctcattcgtcgacaggtaatttaaaacatgcccgagttcttgaacggtttgccatgcgagagggtgttctacatcaatactgaacttaaaccaccaagcgtgttcgccatctgctccatgagccatgatacgggcttcttgtacacttggaactttgcagaaaaattgatgaagacgttcaaaactgatttcagacacagcaattgacctagcttgaaaaatgctaatggtagcacagatacagattcttcatattttctttatagtcattacaaacaatatcaatcaaagccattttattcatggtttctccttgactctctcttaatctagcttcagatcaagataaaaaggaatactccatgaaaaagcctattgttctcgtactttcaacattaatgttgggtatgtcggcaactgcgatggccgattcaaatcatcgttgggataactatcacggtaaagaccataatcgctatgaacagcgtcatgattatcgttatgaccaccgcaatgatcatagagctcctgtttggtcacactctgagcgtggcaaccattatggccgatatgtagcctttaagcgcggtgatcgtattcctgtggaataccgtaatagccgttattatgtctcagactggcgtgcacatcgcttatatgcaccaccacgtggataccactgggtgaagactcctaaccaatacttattggttgactcgaaacatcacatttatcgagttcgttaaacgtaaaataaaaaaatggcccgcttgaggccatttttttatgccaactcgtcatcttgcggttggggcgtttttaacgaagtaggtgtttttgaatgtttttctttcataacagatgggtagtgccaagaagcaaaacggacaactaaaatagagagagctaaaataagaattgagccagtaataatgacttgatcaaggtcggctttatggtcatgttggatatcagaaataagtaaacgtgttagggctgtaatggcgacataaataagaaaacgtacaggcatatgattggttttaaagtaaattccaaccattgccccaagttctaggtaaataaataacaataagatgtcatcgattgatgcatattttttgacggtcagaatttcaaaaacggtatgagcagcagaccaagcaatcatacagcctataataaataaggctaaataatgaaaagcctcaacagcataatgtccaaaccgatcaagggttctttcaaactttttgggatcaggcatagtaaaatcttttttgatatgagaatgtttaaaaattaaacaaattttgtgccaatggaaatagtaaatacaaaataaaaagcgcctgattattcaggcgtttttattgaaatttagttcaattcaaataataagacgatatccactatcaaagcgatggctattccaaattttcatattgctgaatggcatcttcaaatgcaatatggcctaaaaatttacctatactctttgtgggctgttcttgttcaatcgcatgcgcaaatttcacagccgcctcattttgtaattgttcataaagtcgtttgcagtttggaaattgatcaatatcaataacattatgatatttcaaccaccgtgcgatacctgcgtagtatccgtctacaaaagataattgatcgcccattagccaagtttgatttgtcaggctattttctaaagcggtaaatgcttttttaacttggactgctccatattcacgtaatgcttgtttattaccttctgatgaagagtgttcaaggctataccagagtgggctaaatgcattaaataaagtcgtattcaaaaaagctagtttctgattaaagagattaaattgttctgttccttgctcataatgaaaagccgcattcaggctttttgccatgatatggttcaagatagccatgctttccgttaaaactttaccattatcgtagagcagtgcgggtgtttcgccgactggattaatttggcggtattcctcggtattacactgagccggcatctcaattctacagagctgataaggtaaacctgaccattctaaggcaacaatagaaccaaatgaacagccagatgggacgccataaaataaagtgaaagtagacatgatgattactcttttgtgatgtgtaaaatcatcttaagtcgccagaaaagtttctagtagtcaggtattatgagacttattgtctacatatatggacattgaagaatgctacttagacaaaacttgaatgatgtttatctctttgttgttgctgtagagcatcagggattttccgcagcagctaaacggcttaatttacctaaatcaacaatcagtaagcgtgttgcaatattagaaaaaaagctaggcttaaccttaattcatcgtagttcacgtagttttgtcttaagcgaagcaggtaaactgttttatcaacatgccaaaaatgcagtagatgagtttcgttatgcagaagaaaatttattaatacaacaacaagagccaagtggtgtagtcaggctcagtgcttctgtacccattgcccagtatcttttatctgattgtttgcctgaacttgcagaacgttatcctaagttgttattgcaagtagaggtaactgatcgttacgttgatgtcatgagtgaaaactttgatatcgtgatccgtagtcattttcaacccttgccggattctgggttaattcaacgtgtacttaaaaatgataaaatcatcgctgttgcagcgcctgcctacttaatgaaatcgtctcctatacatacaccagaagatttactcaaacacgaaggtatatggcctgaattgcaaatgaatccatggcattttcaaaatataaatggtcagaaagagatagtacgtccaaacatccgctttgtagcaaatgagtcggagattttaaagggggctgcaaaaaggggattggggattacgcttttacctgaaactttttgtatgaatgaactatctgagggtagcttaattcatgttttgccagaatggtctgctggtagcgtaacgacaagtttattgatgctaacaagacgagggcttttacccagtgtcaatattactgctgacttcttggttgagaaattaaaaacttaaaagttattctactttttatgattagaaataaaaaacgcctgattattcaggcgtttttataaaaaatttaattacgcttggtttgtaaagtaatcttcactaaagcccataattaagtcagaaccagctttgattttagcaatacgcgcatcaatatccggcaagatacgttcaacaaagtattgagccaatgcaagtttgttttggtagaaatcaccagatttatctttagcagcggcagcaatttttgcaaacatataagagaagctgagtagacccactgcatgtaagtaatcaacagcagcagagttcggaaactctacgttctctgcagcttgctcaataataaactgagtgattgcttcgatttcagttgcagcatctaaagttgcatctttaatgaagttcaaatcagtgtctaagtcatttgcaaagtcacgaatttcagtgatgtattcagcaatgaatgcaccgccacatttaatggttttacgaccaattaaatcttgagattgaacgccgttagttccttcgtagatttgagcaatacgaagatcacggatacattgctccataccccattcacgaatataaccgtgaccaccaaataccatttgagcatctaaagttgcttggaaggctgtatctgtgaggtaagcttttgcaattggggttaaaagcgcaacacggtcattggcttttttcacggcttctgcatcagttgagaatttagtgatatcgagctgctggcctacataaactgcaaaggcacgagaagcttcgttgtttgcacgtacatttaacaacatacgacgtacatcgccgtggactaaaatgctatcagcgggtttgcttggtgactgaacaccagctgcactacgaccttgtaaacggtcagtcgcgtattgagcagcattttgataagcaaattcagaagcacctaaaccttgaatacccattgataaacgttcgtagttcatcatcacgaacatggcagcaaggccttcgttttctttaccaacgaggtaacctttcgcaccgtcaaagttcatcacacaagttgcagatgctttgatccccatcttatgttcaatagagcctggaccaacatggttacggtcacctaaagaaccgtcttcatttacaaggtatttcggtacaataaatagcgagataccacgtgaaccagcaggagcatctggagttttagcaagtaccaagtgaatgatgttttctgctaaatcgttgtcaccgccagtgatgaagattttagtacctgtaatgttataagtaccatcttcattgcgctcggctttagttttgataatacctaagtcagtaccggcatgtggttcagtcaaacacatggtacctgaccattcacctgaataaatcttaggtaaatacgtttctttttgttcttgagatgcgtagctgcttaaagccatacctgcacccactgaaagaagcgggtaaagcatgaaagatggatttgtcgcgaataacatttcatcggcaagaacggtaagcatttttggcatgccttgaccgccccattcttcatctgcacctaagccaatccaaccaccttctgcatattgacgaaatgcatctttaaagccagcaggagtaaagacttcgccgttttcgtagcgagcgccttcttcatcaccagtacggtttaatggatgagtcacgttctgagcaaatttagccatttcttctaaaattgcttcagctgttgcagcatctacatgagcgagtttctcattagcctgccaaaattgttctgctttaaatacatcatttaagatgaatttcatatcagctaaaggagcattgtaaattggcataatcgttcaccttttttgtgcacatcggcctgtgctagatatcctgtaaaacgaaatggatattgaatttaaaatctaaatttatcattgattttataaaaaaaggaccgtcaaaactgagcagtccttttttggtttttaacattgcatatcgcaactaactatgattagaaagcgaaatgttcagcatctaatgccatcaatgggtctaaaccacctgcgataacgtctacatgagagcgtacacgcggtaaaattttcttgaagtagaagcgagcagtagttactttcgcattgtagaaatcaacatcggttgtacccgcagctaatttctcttgtgctacaagcgccatacgagcccatagataagctaaagtaacgtaaccagagaagtagaggtaatctacagccgctgcacccacttcatccggattttgcattgcacgcataccgatttgcatagtgaggtcgccccattctttgttcagcgcagcaagtggctcaacaaattctttcatggcagcattgtctttatttgcttctacaaacttgtgaacaatcttagtgaaatcacgaagcattgcaccttgagtttgtaaaactttacggcctaacaaatcaagtgcctgaatttcagttgtaccttcatacaaacaagcaatacgtgtatcacgtacgatttgctccatgccatgctcagaaatgaagccatgaccaccgaacacttgaacaccgtgcttagcagattcagaacctgtttcagttaagaatgcttttgcaattggagtcaataaagacaagatgttgtcagcaaacttacgctcttcttcagtttcgcctttttcaacgatatctgcatattgagcaagtaagtaaacaagtgcacgaccaccttcagcaaatgctttttgagttaaaagcatgttacgaacggcagggtgaacgataattggatctgcttctttttctggagctttaggaccagaaagtgaacgcatagctaaacgttctttcgcgtaagttaaagcaccttggaaagaagactctgatgcagataaaccttgaaccgcagtaccaatacgtgctgtgttcataaaggtgaacatacagttcaaaccacggttttcagggccaattaaataaccttttgcttggtcaaagttaatgacacaagtcgcgttaccgtgaatacccattttgtgttcaattgaaccacaacgtacggcattacgttcgcctagagttccgtctgcattgacgttgaacttaggaacgataaataacgaaatccctttagtcccttttggtgcgcctggtagacgagcaagaacgatatggataatgttttcagccatgtcgtgttcaccagcagagataaagattttctcgccagagattgcatagctaccatctgcatttggttctgctttagtacggataatacctaagtctgaacctgcatgagattcagttaaacacatcgtacctgtccaaacacctgaaacaaggtttggtaagtaagtatttttttgctcttcagaaccgtgatgttctaatgtacgtactgcaccgtgagacaaaccagggtacataccccatgcccagttagagctacctaccatttctgaaattgcgatacctaaagagttaggtaaaccttgaccaccgtattgttcttctgctgataaagacgggaagccaagttcgatgtatttttgataagcttctttaaagcctgttggtgtagttacaacaccatcattccaagtacaaccttcacggtcgccaacttggtttaaaggagaaagttcattttcacagaagtctgccgcagcttctaaatattgatcaaccaattcacggcttacgttaccttgaaagtcaggtaattttgcatagtgttcttcagcatttaataattcatgcaaaacgaattgcatatcacgtaagggcgctttgtattgtggcatatcgggttcctcaatactggtgaaaccagagttataatcctaatctacgataatgtgccataaggcaccttgaactattacatcgtgcaacaacttgcataactgtacaagcacctcggggcctttactttgtgactgcaaagtcaagaaaaaaatacttgaactatgtaagtgctttgagtgtaaacacttttgatgaagtttagatgagacaaatagtcaaaatcgtaaatagttatgtataaacaaaaggcgccttctggcgccttttgttttactgtttttagaattattttgcttgagatgctactggagcaggtgcattgactggtggttgaggacgttttggctcaaagcggaggttacatgtaccttcaagtgttttatctccaacttgaacattgacagtttgtccaacagctttaccttcacatgctttttgaatttgctcaaaacgagctttacgctctgcacggtgttgttcccatgctgctttttgttcaggcgtaaattcacggtgtttcatacgatggtggtgaccatcacgtgggccatcttgcatcatgccatgttctggcttaggtggttgagttgttgattgacaagcagccaaactacccatagttacaattgctgcactgaataatgcaattttagccgtcattttcatggttaaaaccctttaatgtttgttttaagatgacttaaagattagataataaagatgaagaaacaatggagagtttttcttttcgttgttggttacaatgcaaaatatagagtaaaaatgagagagtgcttttgaacgttctacgtgttcccatagccttgcggttatttttaacggtcttgcttaccacgctgttaattgcaactgcaagtttgagtgttctgcactggacgatgcaaaagaactttgccaaatatgtagccgatgttgaaatgcaaaagctagatcggctcattactaatctgggaaatgtatataccgtttatcatgattgggggaatgcgattcaggcgcaaatcttacaaattgaaggaacggcagcaccagatgattatgaccgtctttcccagtggtggttacggcgccaatatgatattgccattcagcagcattctttcgatgaacacactctcattaatatttctccagatgcgggaacggtaaataaaaactctatttttagtgatgaagaactacgtacacttgagcaaaacttaccttcggaatatcaaccatttgaaggtttaagattcccgctaagtgcaaaccagtttcgtccaagcgatgataaaaacaaatcaaaaaaaggaagcctcaaagacattgagacgcaaaatggtaagaagcgttttattgctttaccagaccggctgggcttaagttctcgtttatctttatatgatgccaaacaccagttcgtagtgggtgaaccgccgtcttcggatcagatgtcttatcgcccgattatggtcaatagtcaggtcgtaggttatttaggtctaaaaccagttttagataaagaagatgcattaagtattaatttcttcagtaatcaaaagcgctatttacttttaatttatgccttaacattactgtcgagtttagttgcagcacttttaatggcaacttattttaaaaagccaattcagcgtctattaaatgcaacaaatgagttaacaaaaggtaattatcaacaccaagttgtgattaaacgaaatgatgagttaggtgatttatctactcaattaaatcatttagctgaaattttacatcagcatgaagaatcacgacgtcaatgggttgcagatacctctcatgaattgaaaactccattggctgttttgcaagcgcagattgaagcgatgcaagacggtatccgaaaggcaacacctgaacatcttgatgccatgatgcgacaagtttcgagtttaaagaaattgacacaagatttggcagacttggctcaggctgatgctcaacaacttaaatgttatttgagttcggttaatccttgggaagttatactgcaagaagtcgaaaatttcagacctaaactcgaacaagcagggttagaaattgaggtggaaggtgaaggtgctactttattgttagaccgcgatcgatttaaacaaattattgttaatttgattggtaatagtattcgctataccgaaacaggtggaaagattcatattcatacaagtcaaacgcctcaggagtggactttatatgttgatgacagtccatttggtttaagtgatgagcaattatcacgtttaggtgaacgtttttatcgtgtcgatgattcgcgtacgcgtagtacaggtggaacaggactaggcttagctttatcttgtaaaattgcgcaggcgcttggtggtacactcagttttgaacactcaccattaggtggtttacgttgtgtactgacctttaaaaagcagagttaaataaaaggaaaaatggcccatgaaacatattatgttggttgaggatgaagtcgagttagcgcatctggtgcgtgattatcttgaggctgctggattcgaagtaagcatgtttcatgatggtcaggatgcttacacgagctttcaacaacgtaaacctaatttaatgattctggacttaatggttccaagaatggatggtttaacgatttgccgtaaggtacgtgaacagtcagatttaccgattattatggtgacggcacgtactgaagaaattgatcgtgtcttgggcctaaacatgggggcagatgattatgtgtgcaaaccttttagtccaaaagaactggttgctcgtgtgcaggccgttttacgtcgtttagaacgtaaggctgagccagagcaaaatgattctttccgtattgataaagcacagcaaagaatttggtatcaacaaaaatctttaagtttaacgccaacagaatttcgcctacttgagttatttttagaacatgtggggcaagtttattcacgtgcacaattattagatcatattaatccggacagctttgatgttgccgaccgagttattgatagccatattaaaaacttgcgtcgaaaaatcacggaagtggccgaaactggtaaccgtcatgagtggattcaagctgtttatggagtaggttaccgcttcgaatatccagaagaataattgcttagaaaagttatgctgtggataaccacaatgttatccacagaaaatgtggataaaaaattaagaagaacagctcaccgcgacatcaggtacatcgcttggtaacggacctaaatcttccggtttttccaaatctgattgctttgtatagggatggttgagtagcttaaataagcggtcaacctcactaaaatcatctcgctccgctgcctcaatagctcgctgtgccatatggttacgtaagatataaattggatttacctgctgcatgtttgcatcaagctcatcaatatcttgatattcacggatgttttgatactgcgtaaggaatgcatcaaattgtcgaatatcaaggcagtcatcacgtaaggctttgtattctttattttgaaggcgaatgaagctttgggtgtaatcgagctgctccgcttgcagaatacgcaaaaagcttaagccgcattcagtactgtctttatgaaaatgaggaagccccattttttgacacaacccagtggtgtaatgctcaataaaagtcggctcaaattcttctaaacaagcggccaacgcttctttgaactgctctttatgctcaggttcggcaagtggaatgagattatttaaccaagtccataagttccagtgcgcaatactcggttggttttgataggtgtaacgcccttggtaatcggaatggttgttaatccaatttggtcggaaacgttccataaaaccgtatggaccaaaatcgagtgtagaacccgtaatatttaagttatcggtattcatcacaccatgagcaaaaccgaccagctgccatttggcgatcataatggctgtatttctaatcacagctttagcaaaagctaaaataggttgctcttcttgttggcattctggatagtgccattcaatgcatttttgagtgaactcggccaatagctcaggtgcatattgattgatccattcaaaatggcctaaacggatatgacattcagatgttctaagtaacattgcgccaggttctagcttttcacgctgtacaccttgagtggagcttgtaaaacctactgcgtgactagaagcaacccctaaagcatttaaagcatgtcctgctaaatattcacgaataacagagcgtaaaactgctcgcccatctcccatacgcgaatagggcgtggggcctgcaccttttaaatgtaaatctatggtttggccttttttattaagaatctgcgcaatgagtaagccacgtccgtcgcctagttgaccggcccattgcccaaactgatggcctgcatacaccatagccaaaggcgggaattccgagaaggtacgctgaccactgcaaatttcaacccaagcctgtttttcttcatctgtccattgtaactcttcggctaaagctaaattaaagtgtccagcctttgcaccgcgaagcggagagggttgctggatatgaaaaagcttaggattgagcgatgaataaagcggattaaattgcataggctggactaaatatttgaggcaaaattcactataccatagttaaaaacaagccaaaaaaatagcacctgcaaagtatggctctacaggtgctatttcgggataaacacgtattagtctggtacgacgtttgtgttctttttaatgttacgcattaaagtttctaaacactcacggtgatgactcaaacgatgttcaagcaattggaaatcaacttttaacttgtgatccattttgtgaatcttttcagccattgctgctttctttgcttgtaactcttgttctttgagtttcgcccagtcatttaaagtatgtgtaaatgcttcatactcttgagcaatacgttgcttcatttgactaatgtcggcatttacatcatgaccataaatagccaagtcttgttcagcatatttaaacttcattgccaattctgcttttttaatattaaagcttggaatacgacgtaggttctttgctaaaccaatcttagagcatgtccagattagccattttgttggatcatattgccaccatttcacaccattacgatagtcgtactggaaaatatggtgatagttgtggtaaccctcaccccaagttgcaatcgctaaccagaagttatcgcgtgctgagttttcatcggtataagggcgtttaccgaacatgtggcaaagtgagttgatgaagaatgtaacttgatggctaatgattaaacgtaatagaccaccaagaagtacaacaccccataaatcgccagttgcccagccaaccaaacctaaaataccaacgtgaaccgctacgaccatcaaggcgtagtatttatgttggaacatcaccagtttgtcattgagtaagtctggtgcatttttaaaatctggttcagatggagaatgatcgcggatcatccaacccatatgggcataccaaaagccacgttcaattgaatatggatcttcatctacatcgtcgacatgacggtgatgggtacggtgaccagatgcccaaaacagaatactgttttgtacagcaaatgtgccgccaatcattaaaagaattttaagtggtaacgacgcttcataagcacgatgtgcccaaagacgatggtaaccagcagtaatccccatgctacttaaagctaaaagaaaaaataagcttacccatgcgcttacactaaaatcataataatacgcataaatcgggattatgattgcagcaagaattggtaaaccaattaaggtaatgctagcggtccagttaattggggccttgagtggggcggaagtcatatccggcagcgctcctagaaaccttgtcatacaaggtaaaaagacaaatcgacatagcaaaaccaatcttcaagatatattgctattttgcacatcatattagcacgtgcttagtgagaatcactagcattattgtacagatgtattgaaagaaccgtaacagaattaaaccatgcctgacaacatttcagataggagaagttgtgtaatgaaaatacagcgattgagaaaaaagaatagcattgatattgcaaggaaattgccattgaaatgtcttttcatcgcaatcagccttgtattggcagcatgtcaaagcacgccgcaacaaaataatcacaaaggccaagtaaaaccaacacatcgtgtacaaacgccagttgtgaaaaagaaagtaagtcctgatggtattcaagatatagattggcaaattacccagataaatggtcataaggcaaaattctttaaccagtggccgactctttcattgaactctacagtcaaaacagtaactggtcatacaggatgtaatcgtgtttttggtcgatacacttttgatttcagccaaaagaaacttgatatggaagttaacgcaggtcattcgagttgtgatggcgcgttggctcaagaagcagaattggtcgattctttacaacgtattaaacgcttccagttggtaggtaataccttatatctacttgatcaaagcggtcagcgtttgattcaggccgagaaaaaataaaaggtggtcaataccaccttttttatatttaaagagcttcaagcattgtggttggaatatctgtaattaagccctgaatatctaaatcccgtagtctttctgctctttctacatcgttcactgtccagacactaatgttcaaaccagcttgatgcgacaattgaatcatttcatctgttgcaagttgatcatgccagccaatatgacagcacccatattgatgagcaagttcaatcgccgttgctccaaccggaagttcaactaataatccgcgtttaaattgagagttgatatcacgtaaagcggttagaatttgaagatcaaaacttgtgatggtcacgactttctcgaaaccttgtaactcagtctcaagcttttgaattaacttttctgctaatgccatatctcttacagctttaacttcaacttcaatatgatcaaagttatcaagtaaatttaaaacgcctgtaagagtaggggttggttcagaggttggccagttaggccaattttgacgatgatcaaatgataatgcttgagccaatgttgattgctctacaatttggtcgacacctgccgtgcgcaaaaaattatcatcatgaatgacgaccaactcttgatcttgcagctgacgaatatcaaattcgacaccacgaatacctaaatttttaatgtgctgaaaaccacctaatgtattttcaggagcttctcggcgtgcaccacgatgaccaataatgcgcatagatttctattgtccgttctttttgataatgatctctttaaacgtagagatcattcttaacttaatctatttttaaatcatctcattaatatttttttgccaaaggacttcttgtccgccttcagcacgctgtaaagcacgcgatgcgacaaataaccagtcagatagacgatttaaaagttgaagggcagtggcttgaatattttgatcgcgagtttgtactgacatgagcgatcgctctgcacgacgacaaacggcacgggcttgatgggcataactgcaagataaagaaccagatggcagaataaattcttttagcataggcaaatcttcattcatacggtcaatttctttttcaagaaattcaatacaaacgggctgaagcaaattgtaatttggaatacaaacttcgccgcctaagtcaaaaagccagtgttgaatcagactcaagcttttgtcccaatcagctttattagccacttggctatctgtgatttgagcacgaagtaccccaataatggcgtttagttcatcaacatcaccaagtgccgcaattcttagatcatctttagcaacacgagagccatcgcctaaacctgtggtacctgaatcgcctgtgcgtgtatagattttgcttaaacggtgtcccatgatagatatcctgaacataaaaaaggggataatgtcggtcagaacattaccccgaaactggagttaagaaaatatttttataatcagattgagaaattaataacggaaagttacgccaacagaagcttggcggccaccgttgatataccagtattccggagagaatgaagattgagcattatatgcagtgttataacgtacatcaccaatattctggatgttcgtaaataactttatatttggattcatattccaaaaagcatttaaatcaacagttgcatagcctggaactttaactgagttttcaatattttgtgcgtttgctttagagcgagagactagagaagcattcaccccataaataccatcatcatagcctgcagttaaagtatatgtttgacggggacgataagggacatctatgtctttatctttatctctagcttctacataagcgtattcagcattaacaaagatattatccttagaccactttagacctatttcaccacctttcatatcagctttatttaagttgatatatgttgttctaccatttatagcaccataactaattaaatttttaacatctgtatagtagccagaaagataggcagaaataccataattaaatttctgatctataccaatttcatatgacttgctttcttcaggttttagatcagggttactataaaaatcatagccgtaagagccatatagatgttcaagggtcggtgctttgaatgcagtaccaatgttagtgtagatacttgttagaggagagatttgataacgaattgcagcttgtccaactgtatgtgtaccaaaccaatcattatcttcaactcggacaccaacctgagtatgaataccattatcgttatattgatgttgtaaataataacctgtagagctgatatctcttacagcttcaggagatgagctagcatcatattttgatcgattgtatgtaacacccgctaaaatattctgatttggtacaaaattccatttggcatttatgtccccttcatcagaggttgtattaaagtggctttgataaattatttgttcgattttatcaagatagtgagaataacgtgcatttaagactaaatcagaagaagccttataactagccagccaatttactagacgattttcaaaattacgttttgcattgttcgttgaatagttcgtagtatagttattcgtaccttgattttggtcaattgctaagcttgtgttaattacatcattactataaccaatttttgcattatatcctttttggtcaaatgctgctttttcacttttatcttgtatattgataatactagtaccatcagtttccatccgttgaccaccgatacttgcataaaaaccactgtcatctacataatcggcatttacaagtgttttataagtacggttttcaccatacacacctgttaaacttgctccagattttgttggattattggaaattaattgtactacgccactaatagcatctgaaccatattgaacagatgctgggccttttaaaatttcgatttggtctacatctgataggttaataaattcaggtgaaacagggcctaagccattttgagtatttaagcgagcgccattttttaataataatgttgagcccgtttgtccaccgcgtaaagataggtctgtgagctgaccaacgccaccagattgctttatataaatagatgcatctttttgtaatacatcagataaatttaaaacaggatttttttcaatttcttctttagaaattacagaaatacgcgctggaacttcactggctttttcagcactttttgaagcagtgataacaattgggtcaagctgagttgcatttgttgcatcttcagcaaaaataacaggtgaacaccccatcgcaatagcgatagcccctaccagacgagtaggttgaaaagatttagacataacatgctccatacattcaccccacgtgaatgatcgggtagatagatgaaacaagtaggtctccggacttcagcgccataattcatttatggacatattcaccttcccacactactgcagtggtgtaagtcgatttcgacttaaaaaatatgctttacattgttaccgttgcgggggcagtgccggactttcaccagcttccctaaagcatgaattgcttacacttgcttccatttgaacgcagtataaagtgccgaattacttcgtacaatgtcatttaaagcaattccctgagaacttttacgcaaggggcaaaaattgcattacaatggcgcttattttaagaaatggttgtagtttaaacagctcatgagccaatcaaaccaaaaacgtacacgagcaaaaatctgtggaattactcgcaagcaagatgttcaggcagtagttgtagcgggagcagatgcgataggctttgtttttttcctccgagtccaagaaatgtaacagttgaacaggcagaagaattagcaaaactcgttccgccttatgtacaaatggtgggtttgtttgtaaacgcgagtgttactgaaattcaggatatacttgattgtgttcccctagatgtattacaactacatggcgatgaaactccagaacaatgtcaggaaatagcgcgtcattgtaaacgtcgctggtataaagcgattcaggttaaacctgatctggatgtaattgctgaaattcaaaaatatcaggcagctggtgccagtgctgtattgctcgatgcatggcatcctgagcttaaagggggcacaggacatcagtttgactggtctaaattcccgaaacttgatattccattaatcttggcaggtggtttaacccctgacaatgtcattgacgctattcatactaccggtgcttttgcagtagatgtgagcggaggcgtagagtccgcaaaaggtataaaagaccaacaactcattgaacgatttatgcaaggagtccaacgtggatcagcaaaataatgtgattgactatacccaattcccagatgcaaatgggcatttcggtatccatggcggacgttttgtgtcagaaactttaatggcggcattagaagatttggaaaatctctattcccgcatgaaaaatgatgaacagtttttggcagaattcgaccgtgatctcgcctactatgtaggtcgtcctagtccactttattatgctgagcgatggtcaaaagagttaggtggtgcgcaaatttaccttaaacgtgaagacttgaaccatacaggctcacacaaggtaaacaacacgattggtcaggcactacttgcaaagctttctggtaaaaaacgtattattgccgaaactggtgcaggccagcatggggtagcaacagcaacaattgcagcacgtttaggtcttgaatgtgttgtttatatgggtgctgaagacgttaagcgtcaagcgatgaacgtttaccgtatgcgtttgttaggtgcaacagttgtgcctgtgcaaagtggctctaaaacattaaaagatgccatgaacgaagcgatgcgtgactgggtaaccaacgttgatacaacatattatgtcattggtacagttgcaggtccgcatccttatcctcaacttgttcgtgacttccaatcaattattggtcgtgaagcgcgtaaacagattttggaacaagcaggtcgcttaccagatgcattagttgcttgtgtaggtggtggttcaaatgcaatgggcttgttttatccgttcttaaacgatgccagtgtaaaaatgtatggggttgaagctgctggttttggtattgaaactggtaaacactctgcgcctttaaatgcgggtcatgtgggtgtattacatggtaaccgtacttatttaatgagtgatgaacagggccagattattgagacacacagtatctcggcgggccttgattatccgggtgttggtcctgaacatagtttcttgaaagatatgaagcgtgtagagtacgtgccgattaatgatacagaggctcttcaaggtttccgtgacttaaccaaaatcgaagggattattcctgcgcttgaaagctcgcacgcgatggcgtatgtctctaagcttgcaccgacgatgtctaaagatcagattattattgcgactgtttcaggccgtggcgataaagacttaatgacagttgcacgcattgatggcgtagaaatggtcgagatgtaagaggatacaatgccaagcttgtttatggtgatgttgggcgggcgtcatgcacgtgctaatacagaagttcatgatgtggtcatggctgtaggagatactttggaagaagtttatcctcaacttaaacaagcttggtttggtgaggctcaaggattacatattgatgcttgggctaagctctcaggagttagttctcaaggacagaactatcaaattcattttacagatgctgctccacaaccagatgatttaaagttatatttaattaatctaggtggatataatgcaagtgaattcggtgaacttcatcgttatgagtttgtggtggcacccaacacggtagttgccaaacaattaggtaaacaatttatagatcggcagtggcaaaaagcacatacagaccgggtcattgatattgatgactgtttagcgatagattgcgtggcaggccgttatattcatttaataaaaggcgattttgctgcaacaatttgggaaaatacatatttgactgtgggataggtcatttgaaatctaatattcatatggaagtgggtaaatggatttaattcaagaaaatggacagcctcgttatgggcgttttgaatctgtaccgtccaccattcatgtccaacgttatatttataaaactccttatggcaaagtcctaaaaggctggcgcaaacaattaaaatataagaaatttaaattttgtggcattcaacataaacattatagtattggtctggcaattgcagatattggctgggtcggacacggttttttctatatctatgaccatgaaacagggcaagtcattgagtggaatgctattcagccgttaggtcacaagacgtatcttgatgaacagcctttgtttaatcaaagttatttttctaaatcgccttatcagtttgatattcagcatgccaatggtgtgcgatacattcgggtaactaaatatggggaaatttgtctgagcgcccgtattttctgcgccggaacagatattttaagcttgtgtacaccaacaggtatcaatggttggacctatacccaaaagcagaccactttggctgtagagggaatgttcattaataagcaaaatcaagttgtacaatttgatgaaaagacatttgcttcacttgatgatacttgcggatttttacgtcctgaaacagcttggttctggctctcatgtaacttctgggatgaacaggggcgtcgtattgggttaaatctggcctctggtgttaatgaaagctttggtaatgaaaactgcctatggattaacggagttttatttccgctcacagacgttttatttgaaaaagtaaatgatgaactttggcaaattagttctctaaatcaaaaacttaatctacaagtgcatattgggtggtgccgatatgaaaatataaacttaagaatgattggcagtcagttcaatcaatggcaagctaaaattagcggcacgattgagcatcagccaacagatataatcaattgcaaagaacaatacggtttactagaacaacattatgcgaaatggtaacaagcaggttataaacctgcttgccaaaatgcttcacccgctgcaatagggtcatttgttttttccaaagtttcaatccaaacaggatactgacgaataacaggatgctggcttggatgaaaatcttttttaaaccaatccatatattgttttttcatagctgttaatgtgccatttttgccaaagaaccaaggtaaacctttaaggttcatcaaaagtctttctcttggactgaagccatcacatttcaacatgatattggtacggtaaagcgtaaaaccgaacatgagtacggttgttaaaacaagcacaaagcgacgtgttgactctggaacttctcccacctgtttcatgacatcaaaggcaacatcgcggtgttccatctcttcaatggcatgccaagcaaacagtgctcgaacataaggataagcgttttctaaagtttttttatggctataaaaggtttctgccattaacgctgttaaatgttcagcggcagcggtcatggcaatattatattgtggtgaacgttttgttagttcaaagcggaaaatctttttaagggtggtcgtgaactggtcaacaggcatgccttgctctttcatgagctgattcattttgtcatgtgcaataccgtgttgagcttcttgtttaataaaatccgcaactcgtttttgtagttcaggatcatcaattttatcgcggaacatacgcacacattcaatgaagtaacgctctccatctggaaaggttaagctgagtgcatcaaacatacgagttaaaaaagggtcattgttaaaccaaaagcgaggtgcttcgtttaaatgaaaatcgagatctttacgaactactggttcgacctgataagaaacatgtgcgttcatcttttatttctcgcaactataaccttttcattagtatgtcgcgagtggtcggctttgttttgacagttatcgccaatttttatacagtttgcgacaaaatggcagtaaaaaggacgcgccatgcaagaatttactatctcaaatggttacttctacctttggaatacgtatttaaaagaaaagggaatagattggcagacacttaatttaagtgaaattcaaacacgtcaagtccaaaatattttatctgcttctatagatgctcaatcttctttagacctttttattgaacttttagagataactgaaacgcgattacatgtgactaatttggctttagagatggcagcctgtattacccctgccaactttggggtcttgggttatatggcgtccagaagtgataccttaggtcaagtggtggagtatattgcaaagtttcatcgtttggtcattgatggtgcacaggttgtccctatacaaattgaacaggatgcctccaaaattcgcctatattggcctttggtcgacgacagtaatattctactaagtgagctgaccttggccgcaatggtacagcttgctaaacagatcgcccctttacatgagtttcttttacagcatgtagagttcgtacaccgagcgcgtggagcagtggttcactatcaacgtttctttcagtgcaaattatcatttgagcggccttactatgcattaacttttgcaagtgaaagtttaaatgttcgccctcaacatgcagacccaactttggtgcaacttttggtgaaacaagctgaagaagctttagttcagcggaaaatacatgccgatttagttcagcaaatacattggatcgtacaggaatactttaagcataagcagcaagcgcccaaaatagaagatattgccatcgagctgaatgtttctgttagaagcttgcagcgccaattacaggcattaaacacttcatttaaattaattttagatgctgagcgtatgaaacgctgcgagatattgttaagacaaaatgaaagtctgactgcaattgccgaccagttaggttattcggatcagtctgcactagcaagagcatataaaaatttaacagggcaaacattattaactcgaaaaaagcaattacagctcatccagaaaaatgcaacgaaatagaattttagatgcttttttgctcaatttgtaaatcaataatggcccaaaaataggaagctttgatcattgagaaaagtttcaaaatattgataaatgtacgccatgggttgtatgaatcatacaatcgaatatcgccataacgttagacctgttcaatgaacaaaaaatagcgttaaaatgcggtgttcttgtatttctacaaacaactcctcaattttaaataattcaaggaaagcacaaccctatgtcacgtcttgccacccgttttgaaaagctgcagtcccaacaacgtaaagcgcttgtatcttatgtcatggcgggtgatccacagccacaagtaacggtgccgttacttcataaaatggttgcggcaggagtagacgtcattgagcttggtttaccattttcagacccgatggctgatggtccggtaattgcacttgctgctgaacgcgcacttgcggctgggacgaacaccttagatgcgctgaacatggtaaaagagtttcgtgagcaggatcaggaaacacctgtagttttaatgggttatcttaatcctgttgaagtgattggttacgagaagtttgtttcttatgcgaaacaatgtggtgtagatggcttattacttgtggacttaccaccggaagagtcaaaagaatttggtgcaatcttgaaacaacatgatatggaccagattttcttacttgcaccaacttcaactgatcaacgtattcaacacgtagcgaatcaggcaagcgggtttatctactatgtttcactcaaaggtgtaacaggtgcagcgactttggatacttctgaagcggctgcacgtattgaaaaaatcaaaggtatgactaacgttccagttggcgttggtttcggaattagtgatgctgcttcagcgaaagccatgggtagtgttgcagatgccgtgattgtaggtagtgctttcgttaaatcttttgcaacgttggcagctgatgaagctgttgaacagacggtgaataaagtcaaggagcttcgagcagcgctcgatgagttagtatgaatcaagaagtgaaatcagggaaagttcttagcccttcgacgccatggacacagcgtccagttccaggtattgaagttgcagatgagcaacagactctcaaagcaacatttactgagccaactattgagtgccctgaatgtcatgctttagtgacacgtacagcaatatcttttaatgcgtatgtatgtccacagtgtgacgaacacttacgaatgaaagctcgcgatcgcttaaactggttcttcgacaatgttgtggctgaattaggtcaagagtttagcgcgaaagacccattaaagtttgttgatagcaaaccatatccagaccgtatgcgtgaagcgcaaactaaaactggtgaaacggaagctttaattgccatgcaaggtaacttaaatggcgtagatatgattgcatgtgcttttgagtttgactttatgggcggctcaatgggtactgtagtaggtgaccgttttgttaaggcagctgaacttgcaattgaaaaacgtcagccattaatctgctttgcagcttctggtggtgcacgtatgcaagaaggtatgttgtcacttatgcaaatggcgcgtacttctgctgcaattcaaaaattaaaagatgcaggcttaccttatatcgtggtgttaacacatccggtatatggcggtgtaacagcttctttagcaatgttgggtgatatccatattgcagaacctaaagcaatgattggctttgccggtaaacgtgtgattgaacaaactgtacgtgaaacactagaagagccgttccagcgtgcagaatatctgcttgatcatggtgtggtcgatcagattgttcatcgtcatgctttacgtgatactgtatctcgtcttgtatcaaaattgatgaacttaccttgaaacaacaagctccactttcaacagactctttagatacatggctcaattattggagccatgttcacgttacagggatcgatcttggtctggaacgtgttattcccgtagcagaaaaattaggcatgactaaacccaatgccaaagtttttactgttgctggaacaaacgggaaaggttcaaccacaacaacgcttgcgtctatattaaaagcacaagggtacaaagttgggttgtatcaatcaccgcatatctatcgttttaacgagcgagtcaaattaggtggagttgaagttgatgaccaaagcctgattgatgcttttgtacaagttgatcaggctcgtcgcgagtgtgatttaagcctatctttttttgaagcaaccactttggctgcttttgttatttttaaacagcaacaatgcgatgtatgggttcttgaagtcggtttaggtgggcgtcttgatgttgtcaacgtaattgaccctaatatcgccgtgattaccaatattggcctcgaccatacagattggttaggcgataccatcgaaaaaattgcttttgaaaaagcaggtattatccgacctcatattcctgttatttttgcaggtgagcaatctttgcctcaagcgattcaagataaggcaaatagctcacaagccacgctatacgcgattaatagagattatttttataaactcgccgatgatggaaaacattggtattttgcaagtgaaggaaccactttaaggttgccgcttggtacacttgcaatcgagaatattgcaggagcagttgcggccgtattaaatagcggacttgaaatctcgcaactagcgctagaggagggcattacaaatgcccgcttggctggacgcttcgaagtgcgcgaagttaatggaaaaaccattatttttgatgccggacacaatcctcatggtgttgaatttttgttaaagcaattgcgaaatttcttagaatacaataaacagtacacagaagttgtcgcagtattttcaatgctggcagataaagatataaaatcagtagtcgatttgttgaaacctactgttttacattggaaaattgctgagttgaatgtgccgcgtgctgcaccgattcagcaattgaatgacgccctgcaaggccagacaatacaacaatttggcaatatcaaagaggcttttaaatcagcgcttgagcaaacaaataacaatcagctgattttagcctgtggttcgtttcatactttagaagcgatttgggagtatttggaagaatgtcaatgaataacaaacaacgctggatgggtggcgttgttttattaggtggtggtgttttattggcagcattacttctaaaaggaaatgaagaaataaaacaggtagatgttcaaccccaaacgtcaacatcaccgaaattacaagctaaaccaaagcaatcagcacaagaagggcagatggtacagctacagccacttgcagttgatgttgaaacagaaaaacgtcttcttgaagaacagcgccgttctcgtgaaaaagctgtagcagaacaagaggctcgtgctgccgaattcttggcaatgcaacaacaagcagaagcggatgcagctcgtaaagctgctgctgaatatgccgcgattaatgctcgccgagctgctgcacaagaaagttccgataatattcctcctgaagtcgcgggtagtgagaataaggcaaaaggacagcaaactgatacaaaaaagtcagtagatctggctaaagcggatgcagataaaaaagctgctgaagcgaaacgcttagctgaggcggataagaaagcggctgaggcaaaacgtcaggcagaagcagacaagaaagcagcagaggctaaacgccaagcagaagcagataagaaagcagctgaggcaaaacgtcaggcagaagcggataagaaagcagcagaggcgaagcgccaagcagaagcggacaaaaaggctgctgaagctaaacgtcaagcagaagcagataagaaagcagctgaagcgaaacgtaaggcagaggccgagaaaaaagctgaagcagagaaagcacgtgagttgcttgaaaatggtgataaaaaatggatggtacaggttgcattggctgctaaccaagcaaatgcagatgctgtagtctctaaattacgtgcaaaaggctataaggtcacgacgagtccaaccagtaaaggtatccgtattatggttggtcctgcaaaagatagagatacggcagatactacacgtaagaaaattacttctgacgccagtttaaatatgaagtcagcttgggtgattgactgggtgcctttagatcagcgtaagtcagattaattttattctgaaatctaattaagatggattcgacagttgctgttgaatccattttacattttcaggggtaaataaacggtcaatattcttccaaataatatgataaccataacccccttgtttcatttctttcactgcatcatcaattgcccagttttcaaaaataattcgatacatggcgacgctggcccctgtacggtctgaaccatgatagcaatgtagtaaaacacgttgattattttgcttggcaagttggatttgctgcataacttctaataaatcttgtcgatcaattgcccatgtattaatcggaatatgaacaagattaaagttttcatttttaaagactaaatcatctgatgctttggctcttaagttaataatagtcccaatttgatggtgttttaattcgggaatcattgctgcatcgggctgttcactccggaaaacatcattgctaatttgataaaaattatgagtttgagaaactaaggttccccaatcgtgaggtctgtgctcatgggcaatactttcgtgttgcatacacccttgaaggcttaaacagaccgcaaatgcaatgagcgaaaattttttcatgtttggtaccgccgaagctcatgggggtcatgtgcacaaatgatctcaatcgttggctcatgttgagccagatgctgtaatttttttaggttaataagacgcttttcattatcttctgcaaatgtcttttctagaaggctaagagatcttaatttatttgctggatttagctctaggtgtgagtagtaagcatctccacaaaataataaccattgattttgttgttttatcgcaataccacaatgtccagcagaatggcccaataatggcaccattaaaatttcatcttgaaatagggggaaaccttttactttttcaaggttaaaccatttttcaccttgttgatactcaacaaagttccagtaccgatgttgtttatattgattagttctataacgaagcttacctttaaaattaggtagttgcgcagcattgtattcagtagctagcacatggacagtggcgtgaggaaagtctgaaattccgcctgcatggtcaaagtcgaggtgagtcacaaaaatgtgctgcacatctttaggatggaaacccagtttctgaatttgttggatagcactgaactcaagattcggttcaattttccccaaccgtttgactaaagaaccaaggcgctgttgcatgtgtagataatcttgtaggccaaatccggtatcaatcagtacaaggcctcgatcagtttctaccaaaagacaatgacaaacaatttcagctttccagcctttctgcccaaataaaggtgcacatacagggcacatactgccgcattttaaatgatgaattttatggatcatgatttttgttttttgcacaaactcttgggaagttataactgatctcaacagtaaaaaccatgtgtattcattaatgtaaaaaaaagccatcgggtgagatggcttttgagatggaaatatttgtttatttacgtgaactggctgatttagaatttttttaatatttgcctacgcactttgcttgtcttgcaggggacctttcagacgcttgcctacgcactgcgtttgtcttgcgcttcgattaaagccttgttaaaggctttaatcttgctcaggctgtggcgtaaggcgtaaataaggtttcaccgcagtataacctttagggaagcgttgtttaatttcctcttcatcttttaaagaagggacaatgaccacatcttcaccttgttgccagtttgctggtgtagccactttatgcttatcggttaattgtaatgagtcaacaacacgtaagacttcattaaaattacgaccagtcgaagcagggtaggtgatgattaaacgaacttttttatttgggtcaataatcactaaagaacgaacagtaagggtttcactggcattgggatgaataaaaccgtatagctcagatactttgcggtctttgtcagcaataattggaaaattgactgttgtattttgagtttcattaatgtcattaatccagcctttgtgcgactcaacatcatctacagataaagcaattgctttaacattacgtttttcaaattcatcttttagttttgctgtataacccaattcagttgtacatactggcgtatagtcggctgggtgtgaaaataaaatgccccaactatcacctagaaaatcataaaaattaatagtgccttcgcttgattcttgttgaaaatcaggggctgtgtcgcctaatcgtaatgtcatgataaatcctcaattgcttaaaatttgttatatgttgaaatgactatgccgcaatttatttattattaaaattattgtttttatattttattatgaactttttatataagtgtaaatatatatgaccaaaacatatgaatttatgggctgaatcaatgtaactttaagataaatttgctaaattagatttctcggaagttgtgctcaatagatgagcattaatgtcgagtttttaggtgccagatgctttaaaggggcttagaaaatgggtaaaaccatttgtctaatgatcagattttttttatgggttttgtgcaaaccccttgtacttcaaatttctgacaccataataaacgactgagaaaaaatttattcatttgaccaagcaagatttagagagtttatccatgttggcaagtctgatcggaggtatcttcggtacaaaaaatgagcgtgaactcaaacgcatgcgcaaaattgttgagcaaatcaatgcgctcgagccgacgatatcagctttaagcgatgcagacttatctgcaaaaactccagaattcaaacaacgttataacaatggcgaaagtttagataagttactccctgaggcgtttgcagtttgtcgtgaggcagcaaaacgtgtaatgggcatgcgccactacgatgtccagttaattggtggtattaccttacatgaaggcaaaattgccgaaatgcgtaccggtgaaggtaaaacccttatgggtactttagcgtgttacttaaatgcattaagtggtgaaggcgttcatgtcattactgtaaacgattatttggcacaacgtgatgctgagttaaaccgccctttatttgaatttttaggtctaagcattggtacaatttattcaatgcaagaaccagcagaaaaagcagctgcttatctagctgatattacctatggtaccaataacgaatttggttttgactacttgcgtgacaacatggtgttttctttagcagagaagaaacaacgtggtttgcactatgccattatcgatgaagtcgactcaatcttgattgatgaggcgcgtacgccattaattatttctggtcaaagtgaagattcttcacacctctatactgccatcaatactattccaccaaaattacgcccgcaaaaagaagaaaaagttgccgatggcggacatttctggattgatgaaaagcagcgttcagttgaaatgactgaaattggttatgaaactgtagaacaagaacttattcaaatgggtttgttagcggaaggcgaaagcttatattcagctacaaatctaaacctcgttcaccatgtttctgcggctattcgtgcgcacttcctattccaacgcgacgttcactatattattcatgacggtgaagtcgttattgttgatgagcatactggccgtaccatgccgggccgtcgttggtcagaaggcttacaccaagcagttgaagcgaaagaaggtttggctattcaacctgaaaaccagactttagcaacaactactttccagaactatttccgtctttataaaaagctttcaggtatgacaggtactgccgatactgaagctgcggaaatgaaagaaatttatggtctggacgtcgttattattccgacacaccgacctatgattcgtaatgaccagaacgatttaatctacttaaaccgtaatggtaaatataacgcgattattcaagaaattatgaatattcgtcagcagggtgttgcaccaatccttattggtacggcaacgattgaagccagtgaaattctatcgtctaaattgaagcaagctggtattcatcatgaagttttgaacgcaaaacaacatgagcgtgaagcagacattattgctcaggcaggtagcccgaatgcagtaacaatcgcaacaaacatggccggtcgtggtacagatattatcctagggggtaactggaaagcgaaacttgccaaacttgaaaatcctacccctgaagatgaagcgcgtctaaaagcgcaatgggaacaggaccatgaagatgtattgcaagcaggtggcttacacattattggttctgaacgccatgaatcacgccgtattgacaaccagttacgtggtcgtgcgggccgtcagggtgaccctggtgtttctcgtttctatttatctcttgaagatgacctcatgcgtattttcgcaggcgatcgtgtcgttgccatgatgcgtgcaatggggcttaaagaagatgaagcgattgaacacaaaatggtaagccgttctatcgaaaacgcgcagcgtaaagttgaagcacgtaacttcgatattcgtaaaaacttacttaaatatgatgatgtgaataatgaacaacgtaagatcatttattcacaacgcgacgaaatcttagctgaaaatactttacaagaatacgttgaagaaatgcatcgtgaagtaatgcaggcgatgattgctaactttattccaccagagtcaatccatgaccaatgggatgtggaaggcttagaaaatgctttacgtattgatttgggtattgagctaccagttcaagaatggctagaacaagatcgacgtcttgatgaagaaggcttggttgaacgcatcagtgatgaagtaattgcgcgttatcgtcagcgccgtgcacaaatgggtgatgaatcggcagcaatgcttgagcgtcatttcgttttaaattctcttgatcgccattggaaagatcatttggctgcaatggattatttgcgtcaaggtatccacttacgtggctatgcgcaaaaaaatcctgagcaggaatataagaaagaagcatttaacttattcgtgaacatgctgggtgtaattaaaactgatgttgtaactgatctgtctcgcgtacatatcccaacaccagaagagcttgcagaaatggaagctcaacagcagcaacaagcagaagcaatgaagctttcttttgaacatgatgatgtggatggattaacaggtgaagtgaccgcttctcaagaagcacttaatgattcagctactgaacaacaaacgttccctgtacctgaaagtcgtaatgctccatgtccatgtggttctggtttgaaatataaacagtgtcacggcaaaatttaatttgtgttataaaaaaaagcagaacgtttgttctgcttttttttcgtttgtagtaagcctgtgaataatgtttgcagttttaagcattaaatgctatttacttctcatccagagtgtatgttggaaagacaatgaaaaaagtattacaacctttatttttaactgttcttgctgtgccaagttttgttttcgcagcagaaacagcttcagcccctcaaaccacaacggttgataaagtacttgcggcaaaaggcccaacttcggctcaggctgtagtgaaacaagaaaatacgacggtgattagccctcgtacaggtattcgttacacattgggtaatacgggtaatcgcccaatcattttacaaactgctgcgatcgctccagcaaactctgcaaatattaaccgtattgttgcaagtaacccagctctatctccaaagagccaagaaaaagcaaaagttgcattaattggtgaagctgctgttgctggtgcggcagcagttgcagcgagtaatgtaactgctccggctgtaccaaacagtgttacacctgcaaatcctgcatcattgaactaagttctatataaaaaagccggtcaattttgacgcttttttatatcagggtgtttgaaaatatttaaatctgattatttacatctacattttttgtttcgcgtattaataaaaacgcaattaatgataaaagtgatgctgctgtaagataataaccaactgcatataaaccatatgtttcagcaagtttagttgcaataagcggtgcaaaagaagcaccaaaaataccagccaagttaaacgttaaagctgaacccgtataacgtactgaggttgggaaaatttctgaaaggacagtaccaattggaccataggtcaagcccataattgataagccagtacacaagaacaaaaacacaatgagtgtgtttccagactctaacatactagagaaaaacagtccgaaaattgcagcagcaatacatacaccaatagaagtagctttacggccaaatttttctgcaaaaatggcagaaagagggataaaggctgcaaagcaaagggttgcaaacaattgaagttctaagaactcaccacgcgcatagcctagtttggttgttccccagttaagtgcgaatactgtagttaaataaaacacaacgaaggtacagattgctgcaattgtaccgagaataagtttgcccgtgtgttttgtcaccacttctttaaatggaatattaacttctttttgcttatctaaaaccttctggaaagcaggggtctcatgaagttttaaacggatgtataagccaacaataaccaagacagcacttgcaataaaaggaatacgccagccccattgcatgaatgcttgctcaggaatagcagcacttagaagtaaaaatgaaccagttgctaaaataaaaccgataggtgcgccaagttgagggaacatgccataccatgcacgtttgccttcaggtgcattttctgtagcaagtaaaacagcaccactccattcaccacctaagcctaagccttgtcctaaacgacataaggcgagcaataacggtgcgacaattccaatctgagcataggttggtaataagccaatacatacagttgagatacccatagtgagtaatgctgccaccaatgttgctttacgacctatacgatctcctaaatgcccaaatagtgctgcaccgataggacgggcaataaaggcgattgcaaaagttgcaagtgattgtaagactgcggcactaccactactggcagggaaaaatagatgtggaaaaatgataacggcagcagttgcatagatataaaagtcgaagaactcaatggttgtaccgactaaacttgcaaacaaaacccgtgttttcgaattggtggctactacaggagcagcagtcgcagaggttgactccatataagtccttatatcagttaaaatttatttttaatttactattctctttaaaggcatatttttcttaaaagaatagcgtgaaagaacatcatccatgactctttcaggatcactgaatatgagtgaaaaatggactaaacaacgtaccaatagatagcaagaaagtgtgcacctgcacctaaaagcacaaaaatatgccatatcgcatgggtatatcttaccttttttaacgcgtaaaacaatgctccaacggtgtaagctaaacctccagtaatcaataacatcaaagtatctttgcttaaataagttcgcatatcatccattacaaaaacggcaagccaacccataagaacataagcaagtagcgaaattttctgaaaacggtgaataaaaactaacttgaaaagtgtaccaattgcagcaatgctccagagcgcaataagtaaaatatgagctttttgtgtaggtatagcaatgcttaagaacggggtatatgttccagcaattaaataataaatagccgtgtgatcgagttttttataccagtaacgtaaattttgtgtttgtgcaaaatgatagagagtcgaactagtaaacacgagaattaagctaaaagcatatacccataaacctatccactgggcagtggaaagataagatccttttataattaaaaagacagaggcaattactgccataaccacaccagcgccatggctgtaggcattaaaaagttcttcttttgggtcgtaggtttctaacaccgatttactcataagtttattttttgattaaaaatacaaatgtatagaaatacaaaacagtcgtaaagttattttatttttaatcctataccctttaaactttcactttatatgagtcaccattttttaggtatatcagtgtcggttttctcctttgagcaagaacagcaattctttcatgaaatcaaacaaatgcttaatcagcagacttttgaacgtttgattttgagccaatataaaggagagttgacacagctggaaaaaattactttccgtgttgtggagctacatggaaaaaaacaactttccgcgctatatcatcataccacccaagatgtgactaaaaattattcattcgaagatggcttagaacagatgcagtgctgattacgcaatgcaaacaagcgaatttatttgccactcatcaagaaatccagcttaaaaaaaataagaaaaaagccatgcttaatatgggtaaaaaacacagcgtgactactgctccaactgtacaagcgcatgatcgtgagaaacagcgttatgtacagcagggtagtgcatttttaaaagagcttggcattaccgatgagaaagctcaaatcattccaagcatggctcgtaaatggaagcagattaataaatttatcgaaatttttgcgagcgcatatgagcagattgatgctgagcaaaaagagttaaatattgtcgattttggttcaggaaaagggtatttaacttttgctttgtatgattatttacaagaacaacaaaaggttccgctcattacgggtgtagagctgcgccgtaatttagtggaattttgccagaacgttgcagacaaagtacattttaatcatttagacttttttgaaggtgacgttcgtagttatcagccggaaaagctggacgtgatgattgctttacatgcatgtgatattgcgactgatttcgctatccatacgggaattcgtttaaatgcttcaatgattatgtgtgcgccgtgctgtcacaaagagttgcgtccacaactacatagccctgaagttttacaaccaatgctacagtttggtattcatgcgggacaacaagccgagatgttgaccgataccttacgtgctttacttttaaaagcatatggctatgaaactaaagtttttgagtttgtatcgcttgaacacaccagcaaaaataaaatgattttggcgactaaacgcaaaaacgtgacacaacctgatgccaagattatggctcaaattcaagcattgaaagaaatgtatggaattaaaaaacagacattggaattgttattacaagatcagctgccgatcgaaaatattggctgcaaatgctaggaaggtgagtggatgtataaagttatagcgggtagttggacgcagtttgaggaagatgcaaaatacatccgtgaacaagtctttattcaagagcaaggcattgagcccaaagatgaatgggatgatttcgacagcactgctgtgcactttatggtgtatgacaaagagcagcctatcgctacagcacgtttgttgccacagcatagcgtagggcgtgttgctgttttaatgctttatcgaaagcagggtataggtaaaattctaatgcagcatattattgaatatgcgcgccaacataaattgccttatttaaagctttccgcgcaaacctatgtaacagctttttatgaagctctaggttttaaagtgcagggtgaggtttaccaagattgtggtattccacatattgatatgactttagcgttaagttgagattcctttttagaaatctcaactttgaattacttcatcgcattccagttttcgatggcttgtaagcctgtttccaaaccaacttcataactgtaacgaagctttttcggatttgtcgttaaacgccctgccatatttttaagaggcggtggacatacctctaaaatttgctgttcagggttactgctacgaacaaattcaactgaagcattataacgggcacagcggttacgcaaactatttgcaaaaccgtaatggtgtttaaaagcatatttcgcaaggaattggtcgcctcgactacttgctttaaagtagtttttcggacgagtgcgtaaaactaatagctttttgacaccactttgctgggctgtccagcggacaggtagggcatctgcaacgccaccatcaaaatagggttcacccataatatcgaccggatgacgggttaaaaccggaattgagctagacgcacgaagtgcatttaacaggttgtctttgccggcacggagatattcggcttgccctgttttagcatgggtgagtaccatataaaaatcagggttgctcgcaaaaagacgttgctggtcaagcgggtgctcttgctcgccaatttcccacatccattttaaatcgagtaaatcaccacctttaaagaagcgtttgtaatcgataaattcaggacgtagtgaatgatcaatatagaaggttaacgtgcgaccctgttggcctgccaggtagttagctacattggtcgaaccagaagatacgcccacatataaatcaaaagggttgaaccgttgttgtagaaaagcatcaagtacaccactggtaaaggcaccacgcatgcctccaccttctacaaccagtgcattgcgagaaaaatctgtcatttgaaaaatatctgattactgatgtgaatgctgatgttcttgcatgtccatttcaggcatattgtcatgctgagtttgctgatctgttgatttctcagctttttgctgcatttcatgctgttgagctttgcgctgtgctcctggcatatagtcaggctcattactcattgctaaatagaaaaagccaaggaagatcgcacttaaaacaccgacgattagaacaaatttccagcctaaaattgctgattcggaagaatttttatcggacataaggatatctcgaatgtgctgtagaagcacagaaatgaagtctatttatagcatatttaggtataaggctgaaatcttaaaggtcataaagaaaaacccatataaataaaatatatttatatgggtaaggtttatgcaatttttaaatattcaagagctctaacttattgaatattttgcttctgctctgctttagtttttagtaacgttggaggcgtgaagcgctcaccatatttggcagccaactcttcggcacgtttttttgctttatcaataccatattgatttaagaattgaatcgctcctcccgtccacggggcataaccaattccaaaaatagaaccgacattggcatcaatcactgactctaataccccttcttcataacaacgtaaggtatctaaggcttgtacaaacaaaatacggtcaatcatatcttgctcggagatatcatgatctttttgccaacgttttaagccttcccataggtgctttttaccattttcaggataatcataaaaacctgcgccagcagctttacctttacggtttaattcatgaatcatggtatgaatcacttcatctaccggtgttttcggtaactctttgcctacagcttgtagtgccttacgtgtttcacttgcaacatgctccgttaaagttaaagacacttcatcttgaatcgcaagtggtcctaccggcatgccagctttcagtgctgccatttcaatacgcgctggatggacgccttctgcaagtaagcgcataccttcttgaataaaagtaccaaacacacgactggtaaagaagccacggctatcattgacaacgattggcgtttttccaatttgctgtacaaagtcgtaggctttagcaagtgtctctgcggaggtatttttacctttaataatctcaaccaactgcattttgtcgacagggctaaagaaatgcaggccaataaatgctttatcatccttacttgcttgcgctaaacctgtaatcggtagggtggatgtatttgatgccattacaccattaggcgctaagtattgttcggcttcttgagtgactttcgctttgagctcttggttttcaaatacggcttcaataatcaggtcacaaccttgtaagtcttcagcagaagctgtggccgtaatgagcgataaaatctgatcacgtttttctgccgtcatgcgaccttgtgaaacacgtttatctaagagcttttgtgaatatgctttgcctttttcagcattttcaacagatacatctttaaggataacaggaatgcctttaattgcagtggcgtaggcaataccggcacccatcatgcccgcacccaacacgcccactttagtggcttgccattttgcaatatcggcaggacggctagcacccgacttaattgcatttagaccatgccagaaagtgccaatcatatttttagaaatttggcctgttgctagttgagtaaagtagcgagactcgatgcgcaaggcggtatcgacatcaacttgagcaccttcaactgcggcagccataatcgcttcaggagcaggatagcagcccttggttttgtcttttagcatggctggtgcaatagcgagaacttgtgcaactgccggagtttttggatcgccacccggaattttataacccttcacatcaaaaggctgttgagattttggattggctttgatccaagcaatcgctttatctaaaagttcttgttcattttcagctgtgtcatgaattaagcctaaagattttgctttatcgacaccgaactgtttgccttccattaaaaatgggaacgcattttgaagaccaagcagacgaaccatacgtacaataccaccgccgcccggtagtaaacctaaggtaacttctggtaggccaaatttacttttcgggtcattgattgcaatacggtgatggcaacttaatgcgatttcccatcctccgcccagtgccgtgccatttaatgctgcaacaactggaactcctagtgtttcaatcgttcttagatgaccttttaacttctcaaccatattgaaaaagtcagttgcatgctcaggttgaacttgaatcagttcatctaaatcaccaccagcaaagaaagttttttttgctgagcgaaaaataacacctgaaagttctgattctgctttaagtttctgggtgacctcatcaagcgagtcacgaaattctgcattcatggtatttgcagactgaccagttgaatcaagtgtcaagatgacaatattgtcggcatttttttcgtattgaattgcactcatctttatatatccctaaatttttatacacgttcaataatggtggcaatacccataccaccgccgacacagagcgttgctaaaccgcgttttttattttgacgttcaagctcatcaagtaatgtacccaaaatcatggcaccagttgcccctaagggatgacctaaagcaatcgcaccgccatttacgttgactttttcagcaggcacattgagttcatttataaaacgcattacgacagctgcaaatgcttcgttgacttcaaataggtcaatatcatcaattgttaaaccagctttttccaaggctttgcgtgcagcaggcgcagggccagtcagcataatggttggatcagtaccgactagggcagttgccaaaactttagcgcgtggttttaagttttgttctttcactgctttttctgaagccagtaaaacaagagctgctccatcgacaatacctgatgagttaccagcatgatgaacatgatttactttttgtgcttctggatatttttgcagggcaacagcatcaaagcccatttgtcccatcatttcaaaacttgggttgagctttgctaacccttcaagtgtggtattgcctttaataaattcatctttttctaaaatcacaatacctgcgtgatctttgactggcacaactgattgatcgaaataaccatttgcttgagctgccgctgctttttgttgtgactttacggcaaaattatcaacatcttctcggctatagccatctaaggttgcaatgaggtcagcgccgacaccttgtggaacaaaagatgatttaaggttggtttccggatctaacgcccacggtccgccatcagaacccattgggatacgtgacattgattcaacgccaccagcaaccactaaatcttcccaaccagaacgaactttcatggctgccatgttgaccgcttctaaacctgaagcacaaaagcggttaatttgcacacctgcaacatcatcattccagcccgctgcaatcgctgctgttttggcaatatcaccgccctgatcaccaattggtgtcacgcagcccagaacaatatcatctactttagttgtatcgagttgatggcgttgctgtaattcgtttaatagagtggtgagtaatgtgattggttttacttcgtaaagagagccgtctttttttccttttccgcgtggtgtgcgaatggcgtcaataatataagcctcgctcataacagttcctttttttattacttaaactttgtcgtgtttttgagtgtactgtttttaagagggagtgcaatgacgataagcgcaccagtcaggtgatgatttttgccaatggcgatacaaaaaagcccaagttgaacttgggctaaatgtgaaactaaagagatttaagaattaatggtaaccatggagctggcgatatagaccgggagtaacaccagtccactttttaaatgcacggtggaatgtactggtttcactaaaaccaacttgctgagcaacatcttcaagtgttaactcaggattgagtaataaatgaatcgcagcatctcggcgtaaagcgtctttcacgccctgatagcttttaccttcggcagctaggcggcggcgtaaagtttgtggagataaatacaacattgatgcaacgtcattgagcgttggcatttcttcaccaatttggcttttgagtacttcacgaatacgtgaagtcaacgaattggtatttttgaattttactaaaagctgagcaggggctgcttttaagaattcttctaatgttttttcatcttggcgaattggtaagtcaagataatcagccgcaaaggttatttcggtacgcggtgcgtcgaattgcataacaggcgcaaagaataacgcgtcatattcatctgcatgtgcaggacgtggatagctaaaatgaacacgttctaatggtaagcgacgttcaatcagccatgatgccaatccatgccagatcatgagcatactttcagtaatgaaatgatcgggatctaatgtttttggaatgagaggtactaaacgtgcttcatgtttgtcacgctccagcgttactgaccattcatcaccaaataatttgtaaaattgagatgaaagttcaagggcttggcccaaggtttttgcatgaataatcaactgacacataatggcaaaagtgcccaaacgacgcggttgtacatcgaaaccaacgtgttcgtcttgtgtgaccatccataacatttttataaaacgggtatattgttctggtgagattcgagctttaggttgacgtaatagttccgcttcgatacccacatgtgaaagtaacgtctcgacatccatgccaaggcgctttacgcctgtcaaagccgcattcacgaagtggatgctaatcgtatcgcgactcatattgaatccttcagtctctttgatgttcactttaaattgacctaaatgaccgtctaaaaaaataaattggcgatttacaacagtgtaaaagcactttttacatgttaaattgccgaaatgatcaaggtaaatggctgaacatgacattgttttagaatatttgcttaactaatataaaagaaaattcgaataatagtggttaaaaaaacgatgacgactgcattaaatggacttaaagttctcgatttctcgacgctcttacctggacctttcgccacaatgtatttagccgatatgggggcagaagtcatccatattgaatctccatcacgtccagacctcattcggattatgccgccctatgcaaatggacaggcgactgcacatagttatctaaatcgaaataagcagtcgattgttctcgacttaaaagatgctgcaagtattgatctgattaaagccaagatttctgagtttgatattgtgattgagcagtttcggccagatgtcatgcgccgtttagggctggactatgccacccttgcagaaattaacccgcgtttaatttattgttcaattacaggttatggccaaactggaagttataaagatcgggctgggcacgacattaattatttagctttagctggtattgctgggtatagcggccgacaagatagcggtccgccaccgcttggtattcaggttgccgatattgctggtggttcattacatgcagtcattgcgatcttggctgctgtagttgaacgcagccgtagcggtataggtcaatatattgatatttccatgacggactgtgttgcaagtctaaatagtatggcagcttcagccacgcttgccgcacaagttgaacaggctcccgagcaggggatgctcaatggggggattttctatgactattatatgacgcaagatggccgttatctttctatcggtagccttgaaccacaatttatggcaggtttgtctgcagcactagatttacctgtgttattacaaaaaggtgcgtcattagatgagcaagatcgacaggaagttaagcaagccattcaagaaaaaattaaagccaaaacattcaaagaatggcatgaaatttttgcaaatctcgatgtttgtgtagaaccggttttgagtttaagtgaggctttaaattcaccgttagcacaacaacgtggatggattgtgaatgttcctttgcaaaataatacgccagatacagaaccgcaaattgcatgcccaattaagttttcacgttcgcaaatgagatattcctttgtaggtcaaaaacttggcgaagggcagtggtgaggttaaggggctatttcttatacagtatgtattgaaattattatctgaataatcaattgattaacattttgaataatttctttacataaaattagcgtaacctttataaacaaagacataaaaggttcgtaaacatgaaaacgcataaatctttgatggtttcctgtttatccgttttatcaattactctttttgttcagcatgcacaagctgctgctgcatttgacccaaatggttcttggatgttgggtgattggaacgggcaacgtacagcgttgcaagcacaaggttatgatttttcttttggatataccggtgaatatgccggtattttagattccaaacaaacatctacacacggtagtgcttatacagggcaacttgctttaggttctcatttggacctaggtaaaattttagggtggcaagatacagaagctcaaatcacattaacttatcgtgatgggcaatcgctttctgaacattctccagcattggctgggcaccaaagttctgttcaagaagtgtggggccgtgaacaaacttggcgtttaacagatttatggatcaagaaaaaattccttgatcagaagttagatgttaaagtgggccgttttggcgagggtgaagactttaatagttttgactgtgatttccagaacttggcactttgtggttcacaagtgggtaactgggtaggcgatcagtggtataactggccagttagccaatgggcaatgcgtgtcaaatataacttgcaacctgatttatatacacaagtgggtgtatatgaatataaccctgaaaacttggaacgtggcaaaggcttcaacctaagtacagatggttctcacggtgcaattattccagcagaagtagtttggtcacctaaattaggtgtgcaaagcatgcctggtgaataccgtttaggttattactatagtactgccgatgccaaagaaattgcagattcaactaaaacatctcataagcagggtgtttgggtaactgcaaaacagaaattattccagccagctgatcaaactgaccgtggtttaacagggtttgtgaacctgactttccacgactcagataccaacaaagttgataacatgcaaaatataggcttagtctataaaggtttgctcaatcaacgtcctcaagatgagttggcacttggtgttgctcgtatccatatcaatgatgattggaacgatgttcaagccaaagaatacgacaccgaatataataccgagctttactatggtattcatgccactaactggctaactattcgtccaaatgtgcaatatgttcgtcatgttggtgcattaaaaaatggtgataacacttgggtaggcggtattaagttctcaactgcattctaagtaattattccgaaaacggattgtcgagggctaaatcattgattgaagtatcctgaccttccgtttttttctttatgcctgaattttgttttagacgtattggtgatgtcatttttctataagttttttggcacatctttccgataaaaatgatgattgataagaggtggtttatgaatcaaccttcttcaagatcaggtttaacgacttttaccgtaattattattgggttattggcgttattcctgctaattggaggtatttggctcgctacactaggcggttcaatttactatattgtagctggagtcttacttctcattgttgcatggcaactctacaagcgcgcttctgctgctttgtgggtttatgccgcattaatgctaggtactattatctggagtgtctgggaagttggaacagacttttgggcgcttgcaccacgtttagatattttaggtattcttggtttatggttattggttccggctgtaactcgtggaatcaacaaccttggatcaagtaaagttgccttatcttcaactttagcaattgcaatcgtgttgatggtttattctatcttcaatgatccgcaagaaattaatggtgaaatcaagacacctcaaccagaaactgctcaagccgttccgggtgttgcagagagcgactggcctgcttatggtcgtactcaagctggtgaacgttattctccattgaaacagattaatgaccagaacgtaaaagatctgaaagttgcctggacattccgtactggtgatttcaaaacagataatgactctggcgaaacaaccaatcaggttacaccaattaaaattggtaataacatgtttatctgtacggctcaccagcagttaattgcgattgacccagctacaggtaaagaaaaatggcgttttgatccgaagcttaaaacggataaatcgttccagcatttaacttgtcgtggtgtaatgtattacgatgcaaacaacacaactgaatttgcgacaagcttacaaactaaaaagtcgacttcaactcaatgtccacgtaaagtctttgttccagtcaatgacggacgtttagttgctgtaaatgctgacacaggtaaagcatgtactgactttggtcaaaatggtgaagtgaatttacaagaattcatgccatatgcttatccaggtggttataacccaacatctccaggtgttgttactggttcaacagtggttattgccggttcggttaccgacaactattcaaataaagagccatcaggtgttatccgtggatatgacgtaaacactggtaagcttctttgggtatttgatactggtgcagcagatccaaatgcaatgccaggtgaaggtacaacctttgttcataactcaccaaatgcttgggcacctttagcatacgatgccaaacttgatatcgtttatgttccaacaggtgtaggtactccagatatctggggtggtgaccgtaccgagttgaaagaacgttatgcgaactctatgttagcgattaacgcttcaacaggtaaattgatttggaacttccagacaacccatcacgatttatgggatatggacgtaccgtcacaaccatctttggcagatattaaagacaaatctggtaaaactgttccagcaatttatgtcttgaccaaaacaggtaatgcctttgttcttgatcgtcgtaatggtcagccaattgttcctgtaactgagaaaccagttccacaaacagttaaacgcggaccacagactaaaggtgagcattattcaaaaactcagccattctctgatttgaatttggcaccacaagataaattaactgataaagatatgtggggtgccactatgcttgatcagcttatgtgtcgtgtgtcattcaaacgcctcaattacgatggcatttatacgccgccatctgaaaacggtactttagttttccctggtaacttaggtgtgtttgaatggggcggtatgtcagttaaccctgaccgtcaagttgctgtaatgaacccgattggtctgccattcgtgagtcgtttaattcctgctgatccaaaccgtgcgcaaactgcaaaaggtgcgggaactgagcagggtgtacagccaatgtatggcgtgccttatggtgttgaaatcagtgcattcttatctccacttggtttaccttgtaaacaacctgcttggggatatgttgctggcgtagatttgaaaactcatgaagtcgtttggaaaaaacgtattggtacaattcgtgacagtttaccgaacttgttccagttaccagctgtaaaaattggtgttcctggtttaggtggttctatttctaccgcaggtaatgtcatgtttgttggtgcaactcaagataactacatccgtgcgtttaacgtaacgaatggtgagaaactttgggaagcgcgtttaccagcaggtggacaagcaacaccaatgacttatgaaattaatggtaaacaatatgttgtaattatggccggtggtcatggttcatttggtacaaaaatgggcgactatttagtggcttatgcattaccagataacaaataaaagtttgctatcaaaaaagcccggatttatctgggctttttttatgtcaatttagattaaagcttatcaataaaaccgttattaaatatgcaaaaaaagcattttattgatgaataaaagctcgctatgctatccgccttaataatgaatctactagccatacgccatgtatttatataccgatttcgatcagcagctgattaatcaacgagttgctcagttccgcgatcagacagagcgctatttagcgggcaaactttctgaagatgaataccgcccattacgtttgcaaaatggtttatatgtgcaacgttatgcaccaatgctacgtattgctgtgccgtatggcttaatgaactcaaaacaattacgtaaaattgctgaagtatcaactcaatatgaccgtggctatgcacacgtatctacgcgtcaaaatattcagctaaactggcctgcacttgaagatgtgccagaaattttagctgaactcgcaactgtacaaatgcatgccattcaaaccagtggtaactgtattcgtaacacgactactgaccagtatgcaggtgtagttgctggtgaaattgctgatccacgcccaacatgtgaattgattcgtcagtggagtacattccacccagaatttgcattcttaccacgtaaatttaaaattgccgtttctgcacttgaagaaaaagaccgtgcagcaacagcattccacgatattggtgtgtatatcgtgcgtaatgaagcaggcgagatgggctacaaaatcatggtgggtggtggtttaggccgtactccgattattggtagtgtcattcgtgagtttttaccacgtgaagatttaattgcttatttagaggcagttttacgtgtttataacttacatggccgtcgtgataataaatataaagcgcgtatcaaaatcttggttaaagcattaacgcctgaagtatttgcacagaaagttgaagctgaatttgaacacacacgtgaaacattaaaaattcagccagaaatcttgaaaaaattagatgaagagttcactccgtttgattatcaagatttagaagatgaagactttacagctttatttgctgagcatccaaaattcaaacaatggttcaatatcaatacgcatgcgcataaagtaaagggctatcgtattgttacgatttctttaaaacgtgcaggtatcgcaccgggcgatatgaccactgaagaaatgaacttcattgcagatctcgctgataaatatacgtttggtgaacttcgtacgactcacgaacaaaacattgctttggcagatgtacctcaaaaagatttgttcgatgtatggcaagcgcttgaacaacacaacatggctcgtgcgcatatcggctttattaccgatattattagctgcccgggtggtgatttctgttcacttgcaaatgcgaaatcaattcctattgctgaagcgattacacgccgttttgaagatttagataaagtttatgatcttggtcatttagacttaaatatttctggctgtatgaatgcttgtggccaccaccacgtggggaacatcggtattttaggtgtagataaaaaaggcgctgagttctatcaaattaccttaggtggtaattcagaccatgatgcttccattggtgacatcttagggccatcatttgcagcagaagccgtgcctgatgtcattgaagaagtattaaatacgtatcttgatttacgtactgaaggtgagcgtttcgttgatacatatcgccgtgtaggaattcaaccatttaaggagcgtgcatatgcttaatacagctctacctgtgctttataaagatggcacgattgcagataatacttatcaaatcattgctgaagatggtgtgattcctcaaggtgacgttgttttaacaacagcacagctcgatcaactggcgaacactcaaggtaaaaaagctttgtatgtgactgtaaatgattcaccagaagatcatacattcccacttagtgaacttgatgcaatcttcattgagttcgcaggtttcggagatgggcgaggttattcattcgctgcattattacgtcgccaaggtttccaaggtgaactacgtgcaacaggtgatgtatttaaggatgtcttaaattatttaaaacgttcaggttttgatagttttgtcatcaaagaaggtaaagatgtgcaagaagctgctgctggtttgcaagactttactcatccttatcaagcctcaacagctgtgccaaaagcaagttatcaaactggtgcttaaatagcttctaagtgaaaaggctgaactcaggttcagctttttttataaataatttttttaataactgaattgaagaataagaatgttcgctttaatttcaaaaataaatcctggcacttggtggttaatattcgctattgcaacggatgtactttcaaccttttattcagctaaaggcaatggattagttaataaaactgctcagggaattgctctagttttgtatattatctcttttgcatgcgctgctattgctttgaaatatatgcaagctggaattttatatgtgttgtggtctggggtgggggtattggcgaccgcttttctcgcaaagatttttcttgggcaaaatattgatgtcgcaggatggattgggattggttttattacagtcggcttaatgattattgcgcaatactctaatatcgatgtttaaagcccttatagaaacactgagatctctataagggctaaagatttaagtatctaactggcagttaaccatccatttgacaccaaattgatcagtaaaagcaccgtataaagcgccccagaacgttttttctagtggcatttcaattttgccatttacagataatgcatcaaaaagttgctttgccttttcttgctcatctttttcaaggttaattgcaatgtaatgattattgccctgagtaaatacactatttggtgtacagaattgatcaatgacatctgatgccatgagtacagtgtattcgttaatcggcagggaaacatgaagcactaaatttttttgagcttccgataacgtgacaccgtcatgaggcggcatatcgctatagcggctcagcatggcaaattcaccgccgaatactgatttataaaaattaaaagcttgctctgcctggccttgaaaattgagatagtgattgagttgcattgttattgtccattgttgttttcatttagaagaataagttaaaacggaaaagagattttgtgggtcattttttgtagttttttcataaaaaatcccaccgaagtgggattttaaaaaaggttttaattaaagaatttcgatggcaacagctgttgcttccccaccgccgatgcaaagagcagcgacaccctttttaccaccagtacgtttaagcgcatgaataagcgtaagaataatacgagagcctgtcgatcctacaggatgaccaagtgcacatgctccaccatgaatattgactttttctggatcaagtttgaaatcatcaattggacacatcgttaccatagcaaaagcttcattaatttcccaaaggtcaacgtcctgagcattccaacctgcttttttaagtactttttcaatagcgccaacaggagcaattgtaaattctgaaggatgttgagaatttgacgcagtggctatgatttttgcaagtggttgtaagccgcgctgtgctgcaacttcactcgatgttaaaactagtgcagaagcaccatcagaaattgaactcgcgtttgcagcagtaatggtaccgtcttttgcaaaagctggtttaagggatgggattttatcaatcttggcatttaagggttgttcatcctgatcgacaatgacatcacctttacgggtagaaacagtaacaggtacaatttcatctttgaaatagccttcagtaatcgcagtttgagcacgttttaaagaacgaattgcaaagtcatccatttgctcacgagtataaccacgtgtatttgccatatcttgagcaaatgaacccattaaacgtccagtttcagcatcttctaagccatcaaagaacatatggtctttaatttcaccgtggcccatacggtatcccgcacgtgctttgggtaagacataaggcgcattggtcatcgactccataccaccggcaactacaatttcagcacttcctgctttaatcatatcagccgcttgcattaccgccttcatacctgaaccacaaagcttattaattgtcacagctcctgttgaatcaggtaaacctgctttacgcatggcttgacgagcagggccttgctttaaacccgctggtagtacgcaacccataatgacttcttcgacatctgtaggctgtaaacctgctcgtgcgattgcttctttaattgttactgctcctaattcaggagcagttagtcctgatagtgatccttgaaaaccacccatagcagtacgagcaccattaacaattacgatgtcagtcattgttgtaatctccgattgttcttaatctcaaaataagaaatgtttaaaacctaagcagtatattgcaaaatgaagaacgggttagcttctgcattagactgtagagttctaacaatttttaagttcttctaagcgcacatggcccattttgctaagaattaatttaaagtttttaagctggtcataagaacaatagataaaactgccattcgactcgatgggtagtccagaactaccttgaaaaataatactattttgtttttttccaaaacgttgtaatttcatagaaccgtagtgatggttaagatctatagaggttaataactcttcatttaaatcatgctgtagattatggttattatctacaaagctgattacgcggttatcccaattcgtattgcagaccaattgatcagaacttggacaaagaacaacattcttatgcctaataattgcgtcatatttggctttttgtatatgaattgtgagtatacgcggcgtattttttagttctacagatgccataaattgatggtataaaggaatggctataactgacataatcacaagaattacgagtgttatagtgagctcaactatagtaaaaccaggagatttaaacattaaaaaaccttaatatatgtataaatagagcaattttatgttttctgacaatgatttatattattttttataatgaggaaacacaaaattaaataagggttatcagtcggctagaatactggtaaaatcacggcaagcgaaacaaagaagttgttcatatttgctagttgggtaaaaaattaccgaattacaacggaaattgtaagtaattttgtcaataatttacttgattaaaattatcaagcacttggaaagtctatcaagtgtttgtatgattcaaatgtgaatagcttaaaaataatactggggtaaaaaaatatctcaggggccaataaatttaggctgagcttgaacaacaattgttatctctggaggatatccatgaaattgagtcgtattgcacttgctactatgcttgttgctgctccattagctgctgctaatgctggcgtaacagttactccattactgcttggttacactttccaagacagccaacacaacaatggcggtaaagatggtaacttaactaattcacctgagttacaagacgatttattcgttggtgcagctcttggtatcgagttaactccatggttaggtttcgaagctgaatataaccaagttaaaggcgacgtagacggcgcttctgctggtgctgaatataaacaaaaacaaatcaacggtaacttctatgttacttctgatttaattactaaaaactacgacagcaaaatcaagccgtacgtattattaggtgctggtcactataaatatgactttgatggcgtaaatcgtggtacacgtggtacttctgaagaaggtactttaggtaacgctggtgttggtgctttctggcgcttaaacgacgctttatctcttcgtactgaagctcgtgctacttataatgctgatgaagagttctggaactatacagctcttgctggcttaaacgtagttcttggtggtcacttgaagcctgctgctcctgtagtagaagttgctccagttgaaccaactccagttgctccacaaccacaagagttaactgaagaccttaacatggaacttcgtgtgttctttgatactaacaaatcaaacatcaaagaccaatacaagccagaaatcgctaaagttgctgaaaaattatctgaataccctaacgctactgcacgtatcgaaggtcacacagataacactggtccacgtaagttgaacgaacgtttatctttagctcgtgctaactctgttaaatcagctcttgtaaacgaatacaacgttgacgcttctcgtttgtctactcaaggtttcgcttgggatcaaccgattgctgacaacaaaactaaagaaggtcgtgctatgaaccgtcgtgtattcgcgacaatcactggtagccgtactgtagtagttcaacctggtcaagaagcggcagctcctgcagcagctcaataatttgagttcttgaacagtaaaaaagcgactcgttagagtcgctttttttatggcgatttttaaaatatttggtcatttgtaaatctcctgattcataatctcttccaatcattacttaaaatagttaccaaacacctttcttcaattgctgtttagtatcttgtctatttctacgatgttgagcacgaggtttttctgtttcgtgcataccacctttgtgaagtagaggggatagagctacttgattacggaccttaattttcggcatttctttaattttcatgtcttaacctttaatacataaaacttgtttaagagtatgaacgacttcaatgagatctgcctgattggctataacctcatcaatatctttataggcacttggaatttcatcgactacaccactgtctttacggcattcaatcccttgtgtttgttcaatcaagtcctgctgattaaaaagaacttttgctttgcttcggctcattttgcggccagctccatgagaacaggaacaaaaagattcagggtttgctttacctttaacaatatacgagcgtgctcccatagaacctggaataattcctaactcatctaaacctgctcgaattgccccttttcttgtaacaaaaaggttttcaccaaagtgtgtttcttgactcacatagttatggtgacaattgattgcttctttcgtcatttgaaaagaaggtagaagagggcgaattgcttctaatattaatcgcatcatttctttacgattttcaaaagcatattcttgagcccactctactgcttctacataatcattaaagctttgtgagccttcagcaaaataacttaaatctttatcaggcacgtgcccaaagcgatgttgtgcctctttcttggctaactcaataaaataagtacctatgacgttaccaagacctcggctgcccgaatggagcatcacccatacatcttgattttcatcaatacataactctataaagtgattaccgccgcctaaagtgcccaactgtttttgccatgttgcctcaaactgacgaagcattcggacaagacccggatgctttttaataataggttctaagcgtttttcaagtggaataatgctagaagctttcgctttgacttgtttatgcaaagcaaatccaaccggcactttccgttcaatggcgtcccgcaagcgacttaagttatttggaagttgtgaagctttcaggctcaaacgaatagcattcattccgcagccaatatctacacctactgcagctggaataatggcatgtttagtaggaatgacgctgcctacagttgcaccttttccaacatgcacatcaggcataacagcaatatgagaatatataaattgcagttgtgccattttcttgagttgttcaatactttcactatctatgtcttgagtgaaaattttaacggggacaccatattgtgcctcttcgtttaatatcttttgtatgcccataattattctcttatttattgtccgaataggcataaaaaaacctagcgaatgctaggtcttaaattcgagcattcggacaagtgaattaaatttgtacacttgtccgtgagctgacatcgtgccaaatcgttactgtgttttaccttgtagtgttggcatgatgtcctccttttttaaaaagtgccgttgaaaatctgaacggcattttacctgtttttaactaaagatcaagtttttgacctttgataagcgctgattaattacttgaactcagtattaatcttgctctggttttacatccatttgatcgtaaggaattaatttagttttatttttccatttgtatccaagccagattactaaaaataaaggcaagctgatataagtagaaagtaagccaatccagtcaattttaccgcctaaaaccgcttggtagttttgtcctaaaataatgacagaacagaggataaaggcaaaccaaggtgcgaatgggaaaaacttagcgcggtatgcaagatcttctaatttataaccttgagcaatataacctttacggaaacgataatgcgaaattgcaatacctaaccagacaatgaaaccacacattcctgacatattgaggagccagttaaagacttgcttttctccgataaaagtcgttaagaagcagaatgcagcaatgaatgtagttgcatataacgcattcattggaacaccacgattatcgagttttgcaaaccattttggtgcacggccttgttgcgccatatcaaataacatacgggtagaagagtacatgcccgagttacctgccgacaaaatagcagtcaaaataactgcattcattaaacttgcagcaaaagcaaaacctactttttcataaagtaaggtgaaaggagaaagagcaatattttctgttgctgctgcttgtaataagtttggatcatcataggcaataagggtgccgataatgaaaatacacaagatatagaataataaaattcgccagaaaatctgtttaattgcaagcggaatcgtcttcttcggatcttttgattcacccgctgcaacacccaccatctcggttccctgaaatgagaacccggcaatcatggctaccccaatcatggcttgtaaaccacctacgaatggtgcctctttataagtccagttgccaaaagttgctactcctggtgtcaacataatcttaataatcatggcgataccaataataataaaggcaacaatggcaattactttaaccatggagaaccagaattcactttcaccaaatccttttacggtcatcgcattaatcataaagataatgacgagaaagagggcgctccaatagaatccgggaacatctgggaaccagaatttcataataaactgtacggcaacgagttcaaacgcaaccgtaattgcccagttgtaccagtagttccagcctagagcgaaaccaaaaccctcttcgacatagcgacttccataggtaaagaaagcacctgatgttggtgtgtgtgtcgcaagttcacctaaactggtcattaagaagtaaatcataataccaatgagggagtaggcgagtaacgccccacctggacctgcatttgcaatggttgacccagaagcaaggaaaagacctgtaccaatggaaccaccaatggcgatcatattcagatgacgagccccaagcttacgctggagtttttcaggagcatgtgtttcgctcatggagattccttacatagtttgttatgcacaggcatataacaccttaaagccttgaagatcagttttaatctcacactgaccaaagtgcttctcaattaagatcggatagtttaaaaaacggttcgctacaatccatagctcgcctgatgcctttaaatgttttttagcgttctggcagagtccttcacttgcatcatagttggtatgaataccctgatggaagggaggattactgacaatggcatcaagttctgttggggcgtctgcaattcctgtaacaggctgcaatctcaactggtctgaacctattccatttcgactaaaagtcatttccgttgactgtaaagcgaaggcatcaatatctagggcatggataatattacttgaatttgcttttgccaaatagcaactgataattccagctccacacccgaagtcggcaattctacctgatttcacctgatttagataagggagtaaaacggcagttccgacatctagatgagtttggctgaaaacgccgggtagggcacaaatggtaagttcttgctcatttacttgaacagtataggtttttaaccagctttcaagaggtttgatcttttcagttttctcaatttttaaatgccataactgacaatgtcgggcactatcaagtttaagtattttgccaaagctttgtagttgttttgccgctctctcaacaccaccttttttttcacctactaaaaaaactgattggtcaattttcagatggctcatcactacatgcaatatatagtttaaaagctcttttgattttggaacaaaaattatagcctgatcaaattcttgtaatggaaactcaaccgagaaatgagctgttgcgcctgcatttaaaaaaccctgatagtcagcataattccacgtccagactgatgcatcaatctcagtgggtaattgactgactagggcgtcattcggtgcattaattaacaagaccctaccttttaaatagtcatgttgtcttaatatcacttcacttctagggtccatgtacatctctcatgaagaagaatgcccagtgaaaactgggcagtaatcaaaattaaaattggttatttatgtgtttctgggagtacaacatttaaaattaatgctgcaataccacctgttgctacgccggaactaaaaatatttttaaataattctggcagatgctccaaaatttgtggcacctgagcaacacccaaacctaatgcaagtgaaatcgcaataattaaaagggcacggcgatctaaatgaattgatgaaagtatattaatacctgaggcagcaacggcgccgaacattaccatgactgctccacctaatacggcttgtggaacagcttgtattacaccagctacagcagggaatagacctaataaaatgagtaaagcagcaatccagattcctacataacgacttgctacgccagttaattggataacaccattattttgggcaaacacggagcttgggaaagtattgaataggccagcaagtagtgaatttgcaccatttactaacacaccacccttaatacgttgcatccactgaggaccatctacaggttggtttgatagtttactggttgccgttacgtcaccaattgcttctaaagacgtaaccaaataaataaatgccattggaataaataagccccatgagaagcttaagccaaaatgcatcggtgtcggaatttgaatcacgggcgcatcttttagaccagagaagtctagatatcccataaagccggcaagaatgtagccaatcactaaagcaattaaaatagctgaacttttaatccagacaatacgaatacggtttaggacaataataatagcaagaaccgtacacgacattataaggttatcagcactggcaaaagtatggtcctgcatggcttgataaccaccgcccatactaatcaaaccttctttaatgagcgttagaccaatcaggagtaccacaatacctgtcacaaggggagtaattagcttttttacccatgggagaatttgtgatacgcccatttcaataaatgaacctgcaatcacaacaccaaaaatagcagccataacttgattgactggtgtacctgcagcaaccattgcactgccaataccgataatcgggccaataaagttaaaacttgtaccttgaacaataagtaagcctgcaccaaacggaccaacttttttacattgtaagaaagtcgcgattcctgaaatgaccaaagacattgataaaatcatattggtttcatttcgtggaacgcctaatgctaagcaaattagaagcccgggagtaacaatcgggacaataattgcaagcaaatgttgaaaggctgccaaaaaagccacgaacggttttggtcggtcatctagcccataaacgaggtcaagacggtcttgtgatggttgattggacatgggagtaaatacgccgcaatttcgcaaattggcgctattctaatcgagatacctatctttacaaaacgaaatacagactattggaaaatttttttgtcaatgtcaataaactgtcactactcaagagtagtgtttttctgtataatttgccctcaaattttaggcgtttcgaattttcatgtcagatatcaaaaatctccgtaatatcgcaattattgcgcacgtcgaccacgggaaaaccacacttgtcgataaactacttcagcaatcaggtgctctcggtgaccgagcaggcgagattgagcgtgtcatggactcgaatgcgcttgaaagtgaacgtggtattaccatcttagcgaaaaacaccgctattacttggttagacaaacgtaccgatacaacttaccgtatcaacatcgtggataccccgggacacgccgacttcggtggtgaagtagaacgtgtaatgtcgatggttgactgcgtactacttcttgttgactcacaagaaggcccaatgccacaaactcgctttgtgactcaaaaagcctttgctcgtggtttaaaaccaatcgtgattatcaacaaagttgacaagccaagtgctcgtccagactgggtaatcgatcaagtatttgatttgtttgataaccttggcgcaactgatgagcaacttgatttcccaatcgtttatgcatcaggtttacgtggtgtagcgggtcctgctcctgaagagcttgcagaagacatgactccgttgttcgaaacgattgtagacatcgttgagccaccagctgttgatgttgatggtccattccaaatgcagatttcatcacttgactataacagcttcgtaggtgttatcggtgttggtcgtattcaacgtggttctgtaaaactaaatactcctgttactgtaattgacaaagaaggcaatacacgtaacggtcgtatcttaaaaatcatgggttaccatggtttagagcgtattgatgttgattctgcatctgcgggcgatatcgtatgtattactggtattgatgctcttaacatttctgacacgatttgtgatccgaaaaacgttgaagcattaccacctttatctgtagatgaacctacagtgtctatgactttccaagtaaacaactctccgtttgctggtaaagaaggtaaattcgtaacttcacgtaacattcgtgagcgtcttgaccgcgaattaattcacaacgtagctttacgtgttgaagatactgacagtccagaccgtttcaaagtatctggccgtggtgaacttcacctttcagttttaattgaaaacatgcgtcgtgaaggcttcgaattaggtgtatcacgtccgcaagtaatcattaaagaaattgatggtgaaaaacaagaaccttacgaaaacgtaacgtttgacgttgaagagcagcaccaaggcgctgtaatggaacaaatgggtcaccgtaaaggcgaaatgaccaatatggaagttgacggtaagggccgtatccgtattgaagcaactgttccttcacgtggtttaattggtttccgttctgaattcttaaccatgacctctggtactggtattatgacttcaagcttctctcactatggtcctcttaaacaaggtactgttgcgaagcgtcaaaacggtgtgttgatttctatggttcaaggtacatgcttgggctatgcattattcagcttacaagaccgcggtcgtttattcgctaagccacagttagaagtttacgaaggtatgatcgtaggtattaactctcgttcagacgatatggttgtaaacccaactaaagcgaaacagttaactaacgttcgtgcgtctggtactgatgatgctttaactttaacacctgcaattgaattcacgcttgaacaagctcttgaatttattgaagatgacgagttagtagaagttactccaaaatcaattcgtatccgtaagcgttacttgactgaaaatgaacgtaaacgtaaccgtgataaataatttttcttaaatgaaaaagaaaaaccgctaaattcgtttagcggttttttattgcttactggtaaagctgaaagtaaacttaaagtcatatttttcttgtaagcaaatatgttgttaaagtgtgaaatagctttctttttttgaaaaaaatattaaattatcaatatcatggcgagtactatctagacggataagaggccagtgaaaaaagaaaaatatgatgtgttcctcccccctacatctggagatgtttagatgagtattattcaagaatttaaagaatttgccattaaaggcaatatgatggatttagccattggtgtaattattggtggtgcttttggcaaaatcgtagactcgttagtaaaagatatcatcatgccacttatcactgtaattactggtggtggtgttgatttctcgcagaaatttatcgtgttaggtgcaaaccctaataacttacaatctctagatgccttacaaaaagcaggtatcaatgtattaacttatggtaacttcctgaccattttaattaacttcctgattttggcttgggttgtgttcttaatggtgaaattattaaacaaacttcgccgtgataagaatgagccagaagctccagctgcaactccagaagacatccaattattacgtgaaattcgtgatgagttgaaaaaacaagcttaataaaaagtatttaagtataaaaaacggtacctagtgtaccgttttttattacatagcattttatactggactagagatattgataaacttgctaaatcacagttaagtttagctaagcagatagaacaaggacataaattaatgaatcagctttttgtatatggaactttatgccctaataaagcaaatgctcatattttagagcagattggtggtaactggacaaaagcgagtgtacgaggagtgattcatattttagattggggaccagacaaaggcttaaaggccttagaattagatccagaagcagattgggtagaaggctatttgtttagcacagaaaagttagcagaaaactggcaaatgttagatgattttgaaggctttcaataccaacgcgtgacagcagatataaaattagaatcgggtgagtatgttaaagcctggacatatcaaatcaatatgcaggctaaagctccccacaattacaagtaaaatgctgaaatcaacgtaagccagtcattctgaatttaacttctaagagatgatagccaaactggcttttgattggaccttgtaatacacgttcagcagccgtaaaaactactttgtcaatgacaggcaccaattgcccttttttgacttcaccaagttcaccaccacgttttgccgaattacaggtggagtattgcttggcaagtttggcaaagtcagcaccactttgtagcttctttttcagctgttcggctaagtctttatctttgactaaaatatgtcggacaattgctgtttgcatgttgtcttcctccaaaaaattaaggctttctcagctttttaagtggttggcactgtgggcaaaatacgctggcacgctgaccgagttttaagttttctaatgtggtttcacagttaacacacatttcaccggcacgaccataagcgagtaaagtctgttgaaaataaccattttcacccatggcattgctgtagtctcgtaaagtcgagccacctaaatcaattgctgacttcaaaattcgcttaatctcaacaaccagtttctcaatctgttgcatggttaaatcaccagcgggctgtgctggatgaatgccaacattaaacaaactttcagttgcatagatattgccaacaccaaccactacatgattatccatgagtgcaatttttatgccgacagatttattcttgagtttaaaagctaaatattctgcatgaaagtcagtacttaaaggctctggccctaaagtatcgatgagtttgccttgagtttcaggattaagccaaagaatacagccaaaacgacgtgggtcatggtaacgtaactgctgatcttcaaattgaataatgagatgatcgtgttttctcaattcatcgtttggttgacacaggcgaaaactacctgacattcctaaatgccagagcatttgatcttgttcaaactctgccaaaatatattttgaacgtcgatttaacccaatgagacgttgcccaacaagtttctgaacattatctggtataggccagcgtaagctaggattgcgtacttcaacacttagaactttttgattcaataagggaaataaactggttttagtggtttcgacttcgggtaactcaggcatgccaactcgcagaattaacagatatactggattaatcaagtataacgtgtggtatgtaatatttcagagaatactatgtcagatattttaccattaagctggtttcaacgagaaacttcggaagtagcatatgatttaatcggctgcgtattatgtaagcgacagccggatggacaagttatccgctgtacaattagtgaaacagaagcttatttgggcgttcgcgataaagcctgccatagctacaatgacaaacgtaccgcacggacagaggtgatgtatcgccatggtggtaccatttatgtctatttaatttatggcatgtatgaaatgctcaacattattactcaaacagaaggtgtacctgaaggagtgatgattcgatcagcatttttaaatagtgcttcaactaaaaaagaatataagcttttggctggacccggcaaactgacacgttatttgggcattgatcggaccttaaagggccagactttaggtgaagaatctggactatggattgaagcagccactacacagccagaagtggttttaacgccacgtattggaattgattatgccgaggaagcaaaagactggcctgaacggtattgctggaaagatcatccatcattaagtcgataattctcatttggcaaacaaacttatatggcaaaacgagcgttccagatttacaacaatgtagaccgaattctatatccagacaagacactgctttttgttatcataactacaatataaataaaggaaataagcatgtccttattacgcttagaccgacttcattactgtattttgatgagtatgggctgtatttctagcccacttgtttgggcagaagacttaaattcagacgttgcccaattgccaactttacatgtggaagcgacacgtactgacaccggttatttacaaacaccagcttcggttttccgaatcgaggcacctcaagtggatagttcttcacaagtaaatttaactgaagttgtgaagggcataccgagtttacagattcgtaaccgtgaaaattatgcgcaagatctacagctatctatgcgtggttttggtgcacgttctacgtttggtgtacgtggtattcgtctttatgtggatggtatccctgcaacaatgccagatgggcagggccaaacatctaatatcgacttaagcagtttagatcatgttgaagttctaacagggcctttttcttcactttatggaaattcatcaggcgggactattttaacttctactaaagaagggcaagggaaagactcaattgagctgagttattcgggtggtagccatgataaaagccgagcaggacttgtgctgcaaggtggagcaaagggtgcgaatgaaccaagctatattattagctcatcatactttgataccgacggttaccgcgaacatagcggtgcagaaaaagtactaaataatgcctctgtacacgataaaaatagataactcattgaaataatgtcataataattgttttctaacgacgaatactatgacacatctcaatgagttatatcttatcttaaacaaatatctaaaatggaacaagtcacatttaaagtgctttgcgctcatcatgcttgtgattattttaaagcaaacatgtaatctttcttctgcatctaaagccttgcccatcaagtgcttaccacaatcattttatcgacgtatgcagcgcttctttgcaggtcagtattttgattatcgtcaaatttctcagttgattttcaatatgttttcattcgaccaagtgcaactgactttagatagaaccaattggaaatggggaaaacgaaatattaatatcctgatgctcgcaatcgtttatcgtggaatagcgatacctatcctttggacattgcttaataaacgtggaaattcagatacgaaagagcgtattgctttgattcaacgctttatagccatttttggtaaagaccgtattgtgaatgtgttcgcagacagagagtttatcggtgagcagtggtttacatggttaattgaacaagacatcaacttctgcattcgtgttaaaaaaacttcattgtcaccaatcatttaggaaagaatcataaaattagtgatttatttcgccatcttaaagttggtcaaattgaatgtcgtaaacgacggattttggttggtcgggtgaaactatatataagtgcactacagttagaaaatggagagcttttactcgtcgtttctcctcagtttaatgccaatgctattcaggattatgcattacgctgggaaattgaaaccttattcagttgtctcaaaggacgcgggtttaatcttgaaaatacgcgcttgacagaccctagacgagtgaaaaaattgattgcggtgttagctataagcttctgttggtgttacttaacgggtgaatggcaacatgatcaaaaaaaagcgataaaaataaagaagcatggacgactctcaatgagtttatttcgctatggtttagactatgttcaaatggcgattcagcgtttaattggttttgggaaaaaagaagagtttaaggaaattttggcaattttaagaaggcagaaccctgataggataagggttctgtgaaatttgtcgtgtacagagaaataatgcaaagctcagctggaatcttgatgatggtagtaaaatcaactgggtaaccaactatgtaaaaatccacgccgatgatccgcagggtctaacgcatgatcagtggaatgcaaatccaaagcaacaagttccatttttaaagcaatttaatgttcgtaaagatattgaacaaacccaaacgggcgtgacatggtctaagccgattaatgacaaaaatgaactctatgccatggcatatttaggcaatcgtcaagtcacacaatatcaatctattcctaagtccacccaagatgcgagcataaaccatgccggtggagtcattgattttgaacgtaattattatggcgctgatttccgttggacgggtaaagagttacttccaaataccacgctaagtgtcggtgtggcacttgatgcaatggatgaagatcgtaaaggttttgaaaactttaatttagtaaatggtcaaccttcttatggtgtcaaaggtaatttacgtcgtgatgaagacaatactttatggaatatcgatccatatttacaagcttcatggcagttcttacctacatggcgtttagacacgggtgttcgctatagcaatgtccactacaaatctgaagataactatttaagtaatggtgatgatagtggtaagacggattacgataaagttttaccgtcggtcgctttaagttggcaaattttacctgaacttatggcctatgtaagttatgccaaaggttttgaaacaccaacttttactgaaatggcatatcgacctgatggtcaaagtggttttaattttgatttaacagcttcaacaagcgatacctatgaaacaggtttaaagtcacaaaaccaattaggtgattttactttggcggttttccagactaaaactaaagatgacattgtttcggccggtaactcaaatggccgatcaacgttccgtaatgcagataaaaccttacgtgaaggtgtagaatttgcatggaataaaaagttatggcgagacttaatagcgaccgcaagctactcgtatttagatgcaacctttgatgctgacattccagcgttaggaaatattgctcagatttcctcaggaaatgccataccgggtattgccaaaaaccaagcttatgcctctttggcatggcagccatcgcacggtctatatggtggtgtagatgtacagtatatggacaaagtatacgtgaatgataccaacagtgacgcagcaccgagctacagtgtaacctcagcaaatgttggttatgcatgggtaatgggcgattggaaagtcaatagctttgctcgtgtagataacctctttgataaaaaatatgtaggttcagtgattgtaaatgacggtaatagccgctatttcgaacctgctgatggacgtaactggagtgcaggtttacgtgtaattaaacaattctaggaattaaaaatggcaaaattatttgaaacggttaatttcgattcactacaactggtcaatagaattgtaattgccccaatgtgccaatattcggcaacagatgaaggcgaaattacctattggcatgaacagcaatgggcaaattacgcgttgtctggagctgggctatgtattgtggaagctacagctgtacaggcggaaggtcgaattagttatgcagatcttggcctttggaatgatcagcaacgtgaccagatcaaaactttattgggaaaagttaaaacactttctcctatgccatttggaattcagttagctcatgctggacgtaaggcatctactgaaaagccttggttgggtaaaggccaaattgcaaaagatcagccacatggttggcaaacagttgctccaagtacaagtactttttcggttcatgatgcagcgccacatgctttaaccattgccgagattaaacaaattcaacaagactttgcagctgcggccaaacgtgcagttgaagcgggctttgagttaattgaggtacatgctgctcatggttacttgctacaccaattcttatcgccaattgcaaatcaacgtactgatgaatatggtggctctttagaaaaccgtatgcgtatgacgctagaggttcttcaggcaattaaacttgctgttcccgaaggttatccggtaggggtacgtttatctgcaacagattggatggatggcaatgagcagtgggatattgagtctacggttggtttatcaaaagccttagagcagttaggcgcggcctatattcatgtctctagtggcggtttacatgagcatcaaaatattactattggagcaggttaccaagttcctttcgcggaacaggttaaaaaacatgtagctattcctgtgattgctgtaggtcttattactgacccacaacaagctgaacaaattttagaaaaccagcaagctgatgccattggtcttgcgcgtgcaatgttatatgacccacgttggccatggcatgctgctgctacattgggtgcaaaagtcaaaattgctccccaatatttgcgttgccaaccacatggcttaaaacagctttttgattctttttagtttttaatattcgggcaaattaagatttgcccgttttcttttgaaatgagtgaggaagtagtctgtggtttttcaggtaattttaccaattttgattttattattgatggggtactgtagtgtcctcattaaactggtaacacctgaacaaattaaggctctgagtgcatttgttattaaaatttctttacctgcttttttaatccaatctttagccaataaaaacttacaagatatttggcacccagcttattttattgcttatggtggcggctctttaatcttgttttttttggcttttatcctttaccgcaagtattttaaaaatagcctaacacatagtgcagtcatatcgatgggcgcttctatgtcaaatacaggttttatgggtacagcgattctaaccatgctaatggggagtcatgctgcaatctatatatctttaaccttaattatcgaaaatttattaatagttgctttaatgctcattttggcagaagcgggtttgcatcaacagcaacggcttttgcctttactgaaaaaaacattcatgaatttacttaaaaaccctgtaattattgcaattttagttgggatgagctgcattttgctagatattcatctgccttcaaaacttggacaagccttagaacttttaggaagaacagcttcgcctctagcattatttgctattggtggcagcttggttggtattggtattaccgccgtgaatttccaaagtatattgttggctggatttaatgtcatccttatgcctgttgtgatttttgggctgttccttttactgccaaacgtgagccaagagatgttatatgctggcactttacttgctgcgctgccaatgccgatcgcttttggtatttttgggcaagcctacggtttaaatgaaagagcattaacccccttaatgattagtaccattattggctttatgggtgtgagtgggcttattgccttgtggtggtaaaagaaaagccccatgaggggctattgtctctttactattttttaggagctggctgcataggagcggcggcagcttgtttattcttctcagcaataattttttcgaccgaagctaaagattctctagcattaggaacattttgcttagcaagctcagtaaagatctgttttgcttgaggcaggttctgaggaatgatattgccattcgccatcatggttgctaaagccatagatgcaggcgcataacccttttgagcaattgtttgcaaagcttcaatgccttggcgtttcattaaaggatttttattttcaaccccttggctaatatcataaagcgctttgacctgaatagcagggtagtttccttttctaatcaaaggcgctagcttttgtaaagcaatttggtgagattgaggttttttctgcgcaaataaaatagtcgctattttgacagttgcatcatcagaaccttgagctgatgccttttgaatatattgactgaatttgttgctatctttggcaacacctaattcaccagtctcataaagttgtgcaagcgtgtaactcgcttgagcataacctttatttgaggcatcttcataatatttcagagctttggcattatctttggcagtaccttggcccatttgtgtcatatagcctaagttatagatggcttgagcatttcctgtttgtgcaagacgttggacttcttgaaaggcagcaggataattttttgctgcgtatagctgctcagcctgtttaaatacatcgtttttagctgcagaagccgtcgtgtctgctgcaaagattgatgaacttgaaatggcaattagactggcgataagtaatttcttcatttctttttaaccttttactttgtagctacatcattccatcgatgtattagctcaattcaatttctcatcataaatattgatggccgaaagtaaacagccgatttgtatataaaacgatgtctataaagcaaactgtggagaaaaataatacgccactctacttaagagaatggcgtattggattattttactgactgtaataatgcttcaatctgttttgcatcacttggtacgccagagattctttgaccatcttgtaagaacagagtgggtgtaccatctatatttaatttctggcctaaagcaatatttttctgaattggacttgtacagcttttgccagccgctggcaatttacggttaagcatataatttgtccatgcttctgaagggtttttagagcaccagatttgattagaaaccttttcagcatttggatgtaagctggtcagcggatataagaatacatatacggttacgttatccaccccaaccatattttgttctagacgctgacagtaagggcaatcagggtcactgaaaatataaagagtacgctctcctttacctttgacgtatttaattgcctgatttaatgggagacttttaacatcaattttacccaattcggcaattcgctcttctgtcatatttttttgttgtttgatatcaactaaattgcctacaaaaaagtattttgcatcttgattggtataaacaatacggccacttgtatagacttcataaattccagcgacaggtgactgatagacaccttttacagggaggtctggataatttgtcttcagattttgttcaagtgttttaacatcagcatgagcagaaccgaaaaaagccaaactcaacatgagtgtagcaagtttagttttcatattttttctcttagattacaacgtggattatgatggcatagaaaacttaaaaaattgatgtcctaatttaatgaattcattagaattttgtatctatagaaaagcccgcagatttatccacgggcttttaatttattaaatataattattgtggtctagcaacatcaccacttaaagcttctggtaaatctaaaacttgaagacctaactcttgaagggcggcaggtttcgcaacaactaaggcaatataaccgtcagtagtttgggtactattaaccacttctacgtcattgtgcaattgagttgctggagcaggtgaatcacccgtaccttgaactaaatgcaaccagtgttttggttttgccttaaaccaaaggcgcgccacaatttcttgacctaagtaacagcctttatcgtaattgacgccttcgcgttgatgtaaacgtaattcttgtggctgaaactcatgttcagtcgcttgagcaatccatgcttgacctgtcatgatggcttgtttttgccattcggaaatatcagtttctgtagagctgaactcagtatggccattcacaacttttgggaatacagcaccttgttcacttaaggtcatttttgaaaaagcaccatattttttaatgtgcttcgcgaattcttcagcttgatcttgagtgacaataatttcaaaactttctgcattattcttttttagccacaagccaaaatggatgcggcctttaagatcacaaatggctgtatagcgtgtttcattttcagctaaacgttcagtatctacagtcacttgaccttgtaaaaacttttgtgcatctacaccgtttaatgcatatgaggagaaagcgagcagactcatgattaatctcaaattcaatatgtttctttatgattgctgactattttgctccatttttactaaaaaatcagccatagttttcgtaatttacttttgtataaaacaataggtttaggtcaaaaaaacaccaaaaatatacgttaaaagaaattctacggtttaagctattcaacataatttttataacttaaatggacttaaaataaggagaagacaatggcaacaggtacagtaaaattacatcgagtgtttaaggcaccagctgaacgagtttatcgtgcttttcttgacccagatgctttagttaaatggatggcacctcacggttttaccgcgaaggttcatagttttgatgcaaaagtagggggctcatacaaaatgagctttaccaatttctcaaccgggtcaacgcattcatttggaggtacttatgttgaactcgttcccaatgaattaattcgttataacgaccaatttgacgacacaaatttacctggcacgatgcaggtcaccattacattaaaaacagtattggtcggcacagaaatacacattacccaagaaggaatacctgaagttattcctgtggaagcatgctatttaggctggcaagagtctttatctttattgaagttgttagtagaagccgacattccagatcaataattgtcttttttaattgagacttaagtaaaaagtgagtagaaaaactactcattttttattttttaaacactatcaaaaatgaacaaaatattgaatgatcatatgaagctcaatgagttaagccttcttgtgagataaagatatggatatacaaattaaaagaatttatgacgatgtaagcggtgatgatggaaagcgaattttggttgatcgactatggagtcgagggattagcaaagaaaatgctcatttagatttatggttaaaagaaatagctccttcaaccgaacttcgtaagtggtttcatgcagagtctgcagaacattgggatgagttcaaacaacgttatttaaaagaactagaaacaaaccccgcagttaaagagttattagaaatcgtttcacatcataaagtcacacttttatattcggctaaagatgtggaacataaccatgcgattattttaaaagaatatttattagaaaagagcaaaagttaaatatataaattttttttggtaaaagtcttttatttaaaactttaaaaaatgagtcatatctcgcataatatactttttgagatttttttatgtctttgccaaactgtccaaaatgccaatcagaatatacatatcaagacggcgatttattaatttgtccagaatgctcacacgagtggaaagaaggggaagctttagtaactgaagagcaagaagtgattaaagatgctaatggaaatgttttggcggatggcgatagcgttactgtaattaaagatttaaaaattaaaggttcttcttcagttgttaaagtcggaacaaaagtaaaaagtattcgtttagttccagatgcaagtgatggtcacaatattgactgtaaaattgatggtattggtcagatgaagttaaaatctgaatttgtaaaaaaagcttaatttgttaattttaattacattttggtagagatcgcaggcgtgatctctacctttttacatttcaacatccttataattttattacgataatgtataaaaagtagactatccaaagcttaatagctcatttatattgtcattaagaagaattaactttcgtccagaataataacgaaagtcatacccacaccaacaaaaaaacgaggttcatatggcaggatggtacgaaattacacaagcgaatgatggacaatatcgctttgtacttaaggctggtaatggcgaaattattttaaatagtgagctatataaagcgaaagcatcagcagtcaatggtattgagtcagttcaaaaaaatagtagtgacgatgcgcgatatgatcgtttaactgcaaaaaatgggaaaccttacttcaatttaaaagctgcaaatcatcaaattattggttcgagccagttttatgccagtgaagcttcacgcgataaaggtatcgaatcggttaaaaacaatggatcttccacaaccattaaagacttaacagttcaggtgtaaaattaaattaaaaaaagcagcttctaaaagctgctttttttatttatgtatttattaacgcgctaatttagctaagagttcttctttagttaaattgctcgcttcagcatcacggcgacctttatattcaaaagtacccgcatcaagacctttttcaccaatcacaatacggtgtggaatacccattaattcaaggtcagagaatttaacgcctggacgttcgttacggtcatcaagtaatacgtcaaagccttgggcttgaagttctgcataaagcgcttctgctgcttcaagagtacgtggtgatttgtgtgcattcattggaacaattgcgatttcaaaaggagcaatcgcttgaggccaaataatccctttgtcatcgtagttttgttcaattgcagctgcaactacgcgtgtcacaccaataccataacagcccattgttactgtaaatggtttgccatcttcaccgagaactttacatcctaaagcttcagagtatttagtaccaagttggaaaatatggcccacttcaataccgcgtttaatttgtagtgtacctttaccatctggagatgggtcaccttcaaccacattacgcaaatcgaaaacttcagtaatctgtgcatcacgttcccagtttacgcctacagcatgtttgtctgcctcatttgcaccagcaacgaagtcagaaagaacagatgcagcacggtcaacaattacagtgatgcctttttcaactaaaccttgtggaccagtgaagccagcagttaagccaaatgcttgaagttgttcttctgtggcaaacgcgagaggagcggccactaaaggatgcttctcggctttaatttcattaagttcgtggtcaccacgtaagaatagggcaacgacaggtacattgcctttctcatcagcaacgccttgaaccaataaggcttttacagattgtttagggtcagcatttaagaactggcaaacatcagcaattgttttttgatttggtgtttcaaccaatttaaattcttgtgtaggcgctgcacgctcacccactaaaacagcttcagccatttcaacgtttgctgcataatcagactcagttgaaaatgcaatgtcatcttcaccgcttgcagctaatacgtggaattcatgtgaagctgaaccaccaattgaacctgtatctgcttgtactgggcggaaatctaaacctaaacgagtgaaaatacggctataggtgtcatacatcacatcataagtttcttgtaatgattcttgagttgcatggaaagaataagcatctttcatgatgaactcgcgtgaacgcattacaccaaaacgagggcggatctcatcacggaatttggtttgaatttgatagaaatttacaggaagctgtttataactttttagctcgttacgtgctaaatcggtaatcacttcttcatgtgtaggaccaagcacaaacggattgtcgtgacgatctttgaaacgtaataattcaggaccatattgttcataacgacccgattcttcccacaagcttgcgggttgagttacgggcatgaacacttccatagcacctgaacggttcatttcttcacgaacaatggcatcaacttttttaagcacacgtgttcccatcggcagccatgtatataaaccagatgccaatttacgaatcatccccgcacgtaacatgagctgatgtgaaatcacttcagcatcgtttggggtttctctcaacgttgcaaataaaaagcggcttgcgcgcatggaaaaagtcctaaaagttaagcgttataaaaacgcggattatacgatagtcgctgcattatgacatgaatcgtcgggtttgacgcagcataaagtttttcaagtcatccagataagtgaaaatgacggggacaaccacaagagtcaataaggtagaggtaatgacacccccaattacagcatgagccattggtgcactttgttcaccaccttcacctaaacctagagctaatggaaccatacccatcaccatcgcacttgttgtcatcaagattgggcgtaaacgggttttgcctgcttgtaaaatagcatcataacgacttatcccatcttccatcgcttttttaataaagtcgataagcaaaatcgcgtttttggttaccagccccatcagcataataatgccaataattgaaaatagatttagggtactcctaaataagaataaggccaggaagacaccaatcagggacaatggtaaagatgccataatcgcagcagggtgaataaaactattaaactgagaacccaacacaatataaataaatacaatcgaaagggtaattgccgttaacgcataacccgcagattcagccatatcggcatttgccccttgagtatcaaaggtataaccagctggcaatttgaatgctttttgcattttatcgatatcttgaccgatatccccacttggacgtcctgaagtgtttgcttcaattaaaacttcacgttcaaggtcacgtcggttaatttgcgaagctccaagtttttcttgggttgtggctacggcgcttaatggaactaaaatattttgcccatttgcattggttttattcgagttgagatataggttctgaacatcttggggaagcacacgtttattttcatttaaacggatattcacatcataagtttcgccgtcacgatcttcccatgttgtgacattgtcacctgcaatgagtggtcgaatcgcattcgcaatttgagaaacagataaacctaaatcactggccagtacacggttaatatgtacacctaaagtcggtttaggttcttttaaagagctttctaaatcgaccacaccatcaattttttccatttcagccatgaaacgatccgagattttttgtagttcatttagatcagatcctttaatagaaatcatgattggcttttgaccaccagacactgagtcttgagcagcagcgactgaagtcactcggatgccagctacactttgtaaacgatcacggaattcattgttgagtgttgtcaggtctgcactacgttcttgttttggttttagggtgactcctaaacctgcatggtttttaccggagtcgacttcactgttaaccactccataagtagaaacgacatcagggaattgcctaataatctgatcaacctgatgtaattttgcttgggtatattctaaagaagaatcaactggggtttcgaactgaatacgaatttcacctttatctggtgtaggtacaaattcggttccgatcatttttgataagcctaatgccacaaccaatgaaacaattgcaataatgactgtgatgaaacgaaagcgtaaggcaagctttaaaagcttttcatagatatgcgttaggccatctaatagattagaaatatagttaaagaaacgttgcagtcgactttcttttttctttacaggatctttccagtgtgcggaaagcattgggtcgagtgtaaagctgatgaacatggaaataagaacagccgtacttacagttaccccaaattggtagaagaaacgcccaattaagcctcccataaaggcaactggtaaaaataccgccacaatggtgagtgtggttgcaagtactgctaacccaatttctttagtaccgtctaaagccgcggtgacatggtctttgccgagctctgtatgtctgacaatgttttcccgaaccacaattgcatcatcaattaatagaccaatactcagtgacagggccaacagtgtcatcatgttaatgctaaacccaaatgcccagatgaatgttaatgtgccaagtagggtaatcggtaaggttaaacctgtaataactgtagagcggaaagaacctaaaaatagtaaaacaattaaaactgctaagactgctccttcaataatggtacgaacaacgtctttaattgaagcacgaatacctttagagctgtcagcgacgactttataattcaaagccgcaggcatttgagcttttagcttctctaaggtttgataagtcttatcaacaacctgaattacattagcatcggaactttttaaaatatcgacagaaaccgctgttcttccattataaaaagcacttgattgcagttcggcttgagtatcttcaacggttgctacttgttttagaaaaataggggaaccatttttattagcaataactaaatcaccaaatccaagaggatggatgacttttgattgaatctgaacaaccagttcagaattcttttgttgtaaggttcctgcaggtacttctatattttcattttttagggtgttaatgacctgatcaataccaataccatagctttgtaattgttcaggatgaaccttaatccgaatttgacgtttagcatcacctagtaaattgacattacccacaccagaaacagttttaagctgaggtacaatttttttgtctacataggagcttaattgagccaagctcatgctgttcgattcaaacacgactgacataattgggctagatgatggatcgtagcgttgtacaatcggtgtatcaatttcatcgcgaaattgggcaataactggagcaattttgtcgcgaacatcctgtgctgcaatcgccgaagacgtatcaagattaaactctgcaatcaccatcgaaagcccttcacttgagcgtgaagtgatttgtttaatacccgaaatggtattgatttgatcttcgagttttttggtaatatccgattcaactgcttcaggtgaagcacccgcatattgcgtagtgacgactacgaatgggaaatcaatatttggaaactcttcaacggtcatacgtttccaagatgctaacccgagtaccattagactgagcatcatcatgatggtaaaaacggggtacttcacactaattcgggtaaaccacataagctatttgctaccttatttatttttttcggttgtaagcgtcacttttttattgatatcagaatcttcaaactgaatacgacttacctgatctgtactttgtaaaccctgaactaaagcgatattttcgttgtatcgttgctcaaccactcgaattttgactttctgaatcgtttgattgcgtattacccatacaaaaggatcatgttgcagattttgaatgctatctaaaggaatggtttgcccctgattgctatcattatgcaaaataataccgttaataaacgcaccaatacttaatgaatcaatcgcttctttagggctcgcaaagaattcaatttgtcggctgtcttggtctgctacaggtgaaatacgggtcagtatggcatgtaattgtttcgagttaccctgaatctgatactggatagagctacctacttttaaggcagattgttgctcaataggtagtttcgcttgtatttctaattgatccggattaacgatttcaaataatgtttgtccaaccgaaacggtttgtcccggttcaacttgtcgtttcgtaatcacacctgaaatggggctagtaataataccgtctcgatcagcttttttagcaatatccacattggcttgttgagctctaacactttcaagttgacctttataatccacctgactttgctcaaactctacacgggcaataaagccttgattgagcaatctttgttttcgattcatcaaattacgtgcaagttctgcttgtgcctgagcagaagcaagattagcctgtgcctgagctaagcgtgcagcgttgtcttgattatttaatctaactaggacttggcctttttgtaccttttgacctacattggctgtaacggcagttgctgttgcactaacttgggcttgaatagaactttgttgtactgcacgaatagttcctgtaaaagcggtttgagcggcgagtgagccttcttttacaggaattaaatcttgaggaatgagttcaatttttttaggttcagatgctgttgtttttggtacttcttgctggttacatgcagctaagattaaactcagactgatcaagcttaatttaaaaaaagtagaaggggtaagatgcgttgtgcgcatacagcatcatcctgtaattcaaattttattttgcccctattcttgataaagctgtaaccttattcaagcttttttaaacgttcgataatattttcataatctttattggtgcgattataggttttcgaaagtatttcaagtgtttgtttaaccttattaatattcataagattgttttcaatcaaggttttatgtctttcgggaacttgttcacccttacgaaaatattccatttcttgccgtttaaataaaattttgtcttgttgtaattggctcagttggtcctgctgataatttatttgttttttaattgccaataatgcttggtctcttttaatcgtcgcagttttactattgctatatgctctttttaatttgttatcttcttctctatatcgagctgataatgcacgctgtgaggactgatttaaatcggcttcagaattataaggatgatttcttttaatgacctgcatattctggtcgagtgcttcatatccatagcgaatatgagccggtgttacggatgtactaatattcgcaataccatgctgatcataataacgataccagacagctttaggagctgcatttgcagccaacgttggggaagagaaaaacagtgctccgcaagaggcaatgcctataaatacagacaagcagttcctataaaaggcatatttcatccgcttattcataaaattccccaaaaaagaaaggtaagtcacttatttttaaataattaatcttaaatatattagttattatttaactgaataaaaatatcgacattataaaaaaaatgataatttttttgaaagtgtgatgaggttaaaagttattgtttataaatgagaaagtagacaaaaagctttcattgaaaatagaagtatagatatgttaaaaatgcgtataaatctgtaaaaacaaatttaagttaaattgcatttatattttatgttatggggatggaagattaaatggaagatgcattccaaaatctgaaagtaatggttattgatgactcaaaaactattcgccgtaccgcagaaactctattgcaacgcgaaggttgcgaagtgattactgctgtcgatggatttgaagctttatctaaaattgctgaagcgaatccggatattgtttttgtagatatcatgatgcctcgtttagacggttatcaaacttgtgctctgattaagaactctcaaaattatcagaacattcccgttatcatgctctctagtaaagatggtttatttgatcaggcaaaagggcgtgtggtaggttcagatgaatacttgacgaaaccttttagcaaagatgaattgctaaatgcgattcgtaatcatgtaagttcataataagtaatttgagggcaaaagaaatggcacgtattctcattgttgatgactcaccaacagaaacttttcgttttaaagaaatcctaactaagcatggctatgacgtacttgaagcatctaacggtgcagatggtgtgactttggcaaaagctgagcagcctgacttggtattaatggatgtggtcatgccaggtgtaaatggttttcaggcaacgcgccagattacccgtgatgaagacacgaagcatattccggtggtgattgtgagtactaaagatcaggcaactgaccgagtatggggtaaacgtcaaggcgcaatcgattacttaatcaagccaatcgaagaaaagcaattaattgatgtaattaaacaatttctaaattaactcatccatccataaaaacataaataacgggataaatacgcccgttttataggatcgagtatggcagcgaatggatttatcgagttacttcgtttgtctaaacggggtaataagaattacgcttcagttcaaaatgaagcacagcgatggtcaggaattgcttttgaaatgagagggcaatacttcgtcgcaccacttggggaagtgtcagaagttatctatccaccgaaatatacaccagttccaaatactcaaagttgggtcaagggattggcaaacattcgtggaagattactttcggtatctgatttggctcattttatttcagggcagcggagttcattttcgtctacccaaaaagtgctgtgtattagccatcatgaccagtatgtggggttggttgtggatcaggttttggggattcagcactttaataaaaaaagttttttttccgagagtttagacttagaggaaaacctaaaagaatattgccaagggtattttcaccaacacaatcaacattggcatgtctttttatttagtcggttattgcaaaacccacactacatgaacgcatcgacaaaatttataaactaatttttatgctgtgaatgaacagcgtatttttctggggagaagctgtatgggctttaaacttaaaaagaaaagtggcaatcgcggtgctaccggaaaatcgagtgtcaattttattgcaaaaatccagtcaaaaattgagcagtttgccagtttatttggggaaagtgaaaagtccaagcctatcctttatgcagcgctgttatgtttagtatgtgcgttaatttcattagcttatctattttataatgtacctcgtcataaccagttaattcgaagtcttggtgagttacgtctgttatctcaaaccatttctaagcaagcaactgaagcaacagagtcgggttctcaagaggcgatcacaaagctacagcaatctaaaaaagactttgatgagaacttacttgaaattgaaaatattcacggtaagtcgaccgatgaatatcaaaaagttgagaaaatatggggtgaggtttcaaaaaatattgatttgatttcatcacatcaacgagtacttaaccagttatatgataccaacatctcgattagtgaaacggttccagagattcaggcagaatataacttgatggtcgaccaaatggctcgccaaggtttgccaagtagtcaggtaattattgctaaaaaccaggtatttattgcagagcgtattttacgttcgattaactcggtgttaagtggtacggacggaaatgtatcaactagtgactttagtgtcgatattgagacttttggtacctatttaaatgctgaactgaatggtaatgccgagttaggtgttgatcgtattgctgatccggctttacgtgaatctttagaaagtattaagtctgaatatgacaaagtcttaaaatctgctgctgcaacggtattaaaaaatggtagccagattgtcaatgttcgtcaggcttcttctcagattttctctaaatcggatgtaatgttggaaagtctaggacatttatctgatgttgcaagaaagaactggctcaccttatttttaggtgctgttcttattctttcattaggcggactaattttctctgtattcaagttaattacactacgtagtgtaatggataagcaacgtgttgctcgattacaggaagaatatgaccgtaaccagaatgcgattttacgtttacttgatgaaattgccgacttggcggatggtgacttacgttcatatgcaactgtatctgaagactttacgggtgctattgccgactcgattaacttcgcaattgaccaactgcgagatttggtttcacgaattcatgaaacctctcaggaagttgcacgctacacacaagatacgcaaagtattactaaccagttagcagaggcatcagaacatcaggcgcaagaaattgcaggtgcttctactgccatgaatgaaatggcacagtcaattgaccaagtatctgccaacgcttctgaatctgcggaagtagcacagcgttcagtacaaattgcatcaaatggtgcacaagtggtaaatcgttcaattgaaggtatggatactattcgtgagcagattcaggaaacttctaaacgtattaagcgcttaggtgagtcttctcaagaaattggtaacatcgtatcgctcattaacgatattgcagaccaaacgaacatccttgcattaaatgcagcaattcaagcatctatggcaggtgaggctggtcgtggtttcgccgtggttgccgatgaagtacaacgtcttgctgagcgctcagcatctgcaaccaaacagatcgaaacactggttaaaacaattcagaccgataccaacgaagccgttatttcaatggaacaaacaacgacggaagttgtacgtggtgcgaatttggcaaaagatgcgggtattgcactggatgaaatccaaaaagtatcgggtgacttggcaaaattgattgcgagcatttccgacgcagcaaaacttcagtcagcatctgcgagtcacattgcaaccaccatgacggttgtacaagaaattacttcgcaaacaacaacggcaacgtttgacactgctcgctccgtatcagagttggcgaatatggcagagtcattacgtgagtcagtaacggactttaaattaccagactaaattgggggataagaatagctattctcatatcgctattcttttaaaagtatgagcagcgccagacaaatattggggagatagttatttttctggtgttgtctctgtagttttccccactcagggggtaagcaaaagaagcctttgctatgaaagaaatattaaaaactttaactgaagcaatgacgctacctgaagatagctattctgaacaagatgctgagtttcttgagatcttcattgaagaaattgaagagatttttgttgatttgcaacctttgataaataaatggatgcagtctgagaatattgctacgctcactgaaattcgtcgtcatttccataccttaaaaggttccggaagaatgattggcgctaaatcttcagctgagcttgcgtggacagttgaagatacactcaaccgggtaatcaaccaaagcttacaattaacgccaactattcagagctatgtgcagttagtatttaagttctatttccttaaattagtagataattttaagcaaaaacgagcacataccttagatttcagacctcttattttattaggccaacaactacaacaacagcaaagtttagaaccagctttagaagagcttttacaactttcaaatacgcttacggccgaaacagtgactggtcttgagctagattatattgaacaagattcgttagccgagccaatcattcaagctactcatactgaaattgaaataaatctagatgaaactttgaccttatttatggaagaggcggaagaacatttagccacgattcatcaatttttggatcaagagttacatcagtacgacagttataacgctttaatccgcgctttacatactttgcgtggtagctctgcaatggcacaggtcgaaacaattttcgaggccagtaccaaagttgagcatttatttaaaatactgctacaagaagagttatcttctcactctgaagaaattttattattacaagaatatcgtgagtttgttcgagatagcttggaactactatctagatatagttcaagtgaacagctcgaagcgagattgcagcaatttaatcaatcttgggatgcatatgttgagcaacatggtgaccgaacagatccgttaatgccttctcatggcttggtatcgcaattattacaattagatgtttctgaattactggatgcagaattagattttgagaagggtattcgtaatgagtttcctgattatcttgaacgcctaagtgaacaggctgatttattactgcaacatacacattctcaagcaatgttgggtttacatgaatataccagccaactgaaagaaagttatgaagtgctgcttgataaacctactttattacaatcagactatatatttgaaatttatcaaaaagcgcatcaacagctcattcaattatttgatgctttagctgctggtcagcgagtcggtattgttaagcaacatcaaagtattttagaagaattaaaactttatacgcagtacactccagacctatcaaatgacctgcctcagcaggattcgacatcttttgaaccaatatccaatattgaacaagagccagaagtagtagctactgtagagaatttctcagactctgtagactgggcggtattaggtcaaagtgtgcagcaagatcgacaatatatttcatctacacaagtgaatcgaaattttgatgctgatcttttagatatctttcttgaggaagctgaagaattacttgagggaattgataccgatcttaatatttgggtaggtgagcaagaaaactttgcagctctgaacaacctaatgcgttatttgcataccttgaaagggggagcaaatatggttcaggcaacgtatcttggtttgattgcccatgaattagaaagcatttatgagcgtttaattcaaaagcaattagtagcaacttcagatttaattgattttattcgtttggttcaagatgacttggctgaccgtttacaaatcatgcgtgaacaacaactagattatgcagccccttacacaattaacgcattaaaacgagcgggtcaaaactctaacttccaacctttaccagtggttgaggcatttgatactgaaagtgagatattctctgagcaagaggtgatatctgaagtaataatagatgagataccagtagaacttgaacctgctcttgcagagttagaaactcatcacgatcaggtattcgacacagcggctaccgagttagctactccagttgaagtaattacctcggttacatcgcaagagagtgaaattgcagctgatgaacaggacattgaggctgttgttgaacagacgttcctggaagaagctactgaattgttagaaatggctgaatcgctattaaaacaatggtttgaacagcgtacaaaccgtagtattttgcttcagcttcaaagagccgtgcacagtttaaaaggtggtgcacggatggtgggtttagaagccgtacaagcaattgcctaccaactagaaaatgcttttgaacaatttgcgctacatcacttcaattcgaatatttatgatcatttattagaaagtgcgattgcatggttaaaagatgcaattttcaaccacaattatcagcatttcgatggattacagcaaagtttagaaaatattcaattctttgaaactacaatccagattccgactaagttaactagagcggacttgtttaactcagaaccggtgatgacctttatacaaggtgatggtacagagcctccaccaatgatgggagcatgggagcaaacagagcgtctggatcagaataatgaaatgatccgtgtttcagctgacttaatcgagaaaatgattgatttgtctggtgaaaactccattaaccgttcacgaattgaaatggacctaagccaatttagccatacactagttgaaatggagttggcgattcaacgacttgccgatcagttgcgacgaatggaaggtgagttagaaacacagattattgctaaacatggaattgaacattctcgttatactgactttgacccattagagatggaccaatattcatctttaaatcaattgtcgaaatcgcttgctgaatctgcatcggacttggtcgactttaaaaatacgttatctgacaaaatcagagataccgaaagtttgcttttacaacaatcacgaattcaagcggaaattcaagaaggtttaatgcggacacgtttggtcccattttcgcgtttattgccgcgtttacaacgaattgttcgtcagacgtctacagcattgaatagacctgctgagcttttcgtaaataatacggaaggtgagttggaccgcaatattttagaacggttagtgactccgcttgagcatatgctcagaaacgcaattgaccatggtttagaagaccgaatgcagcggcaacaagcaaataaaccggaaacagggcgtattgaacttaatattcagcgtcaaggtacggatgttgtggttgtctttagtgatgatggtcaaggcattgatgttgaaaaagtacgtcagaaagcactccttgccggattgatcaagccagaacaagacttagaacagcaagacatactgcaactcattttccatccgggtttaagtacagcagagcaagtcactcagatttccgggcgtggtgtaggtcttgatgtcgtgcagagtgatattaagtctttggggggacatgtcagcgttgaatccgtctatgggcagggaacaacatttacgattcgcgtaccgactacagtagcggtaagtgatgccttaatggttaaagtggcagatcaacaatttgcgattccacttgctcaaatcgatcgaattattcgagtgtcaccagcctctttagagcagtattttgaaagtcctcaagaactatttgagtatgaaaataaacgttatccattacgttatctttctgaatttgttggtaaccaacccataccacgtttaaatggtgtgatgtattcattacctgtgttaatgattaaagccaataatggccaaactgtggcactacttgttgaccagttaattggctctcgagcacaaattgtagtgaaaccaattggtcaacagttctctagcattggagcaattgcaggcgccacaattttaggtgatggacaggtctgcttaattttagacggacaaaatattgcgcgacaaattcagtcaactcagcgtcataaacaacttagtgaagcagtgtatagacaccgagagtctgatgaacgccgcctcatcatgattgtagatgactcagtaactgtacgtaaggtcacgtcccgattgcttgaacgtcaaggctatgatgtggttacggctaaagatggtgttgacgccatagagcagctagaaaatattaagccagatttgatgctacttgatattgaaatgccacgtatggatggttttgaggttctcaatcttgtacgacatcatgatatgcatcaatacatgccaattattatgattacatccagaacaggcgaaaaacatcgtgaacgagcattctcgttaggtgtaagtcaatatatgggtaaacctttccaggaagaagagttactagagaatatcgatgctttacttgtagcgtctgacagtgaggtcaaatcatgaaaggtagtgtaaatacatcattgatcgctaatatggaccaacaagagctacagcatcttattacagtttcaactggttttattgacgcttatatcattgaatgtaacgatcaggtacctatgctattgccacaaaacattgtgttgtctgccatggatgtaaaaaatggcgtaaaacatattgaatggcatgatgtgaagctacccgtctactcagtacataacacaattgatcaacatgcagtagcattagtgattgaaggggaagatattagccaacgttttgcattaatctgtaaaacaatgccagtttctactcgtctgcgtatttctgaaattgtcgatgaaatggatgagcatgaggctgaacaacacccagcagtatttaaatatgtgcgtatgcaagatcaacgctactatatacctaacttagaatatattgaaaaattacttggtttataaaagaaaaaggaactcttttgagttccttttttattttattgagctaataaattttctaaaatttgctcataaatatcagttaatggatcaagatcatgtacatcaacatgttcattaatttgatggatagttgcgtttagaacaccgagttctaaaacttgtgcacctgttggagcaatgaagcgcccatcagatgtaccaccacttgttgaaagctcagtctcagtaccagtcacatttaaaatagcagtttgagctgcgttaactaattcacctactggagttaagaatggtaagccagacaaattccagacaatttcatattgcaagccatgcttgtctaaaatttcatgaacacgttgtttaagctgttctgctgtaacctcggttgaatagcggaaattaaaagtaacttctaaagcaccagggattacattggttgcgccagtacctgcatggatatttgaaatctggaatgaagttgcagggaaatactcattgccattgtcccaaactgtttggcacaactcagctaacgctggggatgcttcatgaattggattacgtgccaagtgtgggtaagctacatgaccttgtttgccttgaaccttcaatacagcattaagagaaccacgacggccattcttaacaatatcacctaatttatgagtacttgatggttccccaaccaaacaccaagtaattttttcattacgcttttccagtgtttcgataactttaactgtaccgttaacagcaggaccttcttcatctgaagtaattaaaaaagcaattgaacctttatggtttgggtgttttgctataaaacgttcagatgcaactaccattgcagctaatgcagttttcatatctgctgaaccacgaccatataatttgccatcgcgaatttctggtgcaaatgggtctgaattccaagcgtctaaacgtcctgttggtactacgtcggtatgaccagcaaaacaaaatacagggccttcggttccacgtcgagcccataaattatcgacatctccaaagcgcataggttcaatatggaagccaaccttagctaagcgctcagcaataatagtttggcaagtatgatcaataggagtaacagaaggctgttgtaaaagttctaagctaagcgagagagtgtctgagtggttcataccggaaattgcgtactgatgaggtgaaatatagtccgatataataggcgaatctctaaaggatgggtatttaaaaataaaaaaaccttatcgaaacgataaggtttttaaatgttaagcataacttacattttattttcagttttttgtgcggtgttagttacagcatcaccagctttagagacatcttgaccaaaacccttgaacgtattacaacctgttaaaacaaatgccaccattacagatgcgactaaaacttttttcatcattttctccgtataaatttaataatgaagtaaatttagattaaaaaacaaacggaaaaagaaacatgattgtttaatagtaaaaacgttataaattgtttctataaggacgtggtctcttgtaaaataccgttatttttgatgagagaaggttttaagcttagtaaagcagggtgcctgaacatataaaatcgggtttcattaatattttgacaatataggccatcagtccaccaataagcagtgtttgaactcgctttttgatgaggacaaagccattcatgtctttctaagcggtaaaagtcagatttagggatttctgtaccccaagtacctaagcgacgttttaaatttacccattcaggaataagctgttcttgaggtaaatttagaggaagataaagttgtccttttaagacagcgaaacgttgttgaactttaaaacccaaagcttctgaaaattgaaattgtttgtcagtaaagtggtaaagctttttacttaaagtatcttgtctatttaaaccaatccattgttctaaatttaattgaccttcacctaggtaatattttagagcaacttcccaatgttcaatttcttgagtattttgatttaaaactaaaaaatcgagttcacctaaagtttttgctccatcaattttttgaatactatggcctaataactgataaggatgatattgatcttcttgtagccaaaaccaaagtaaattttcaaaacgtaaacctaagcgtgtgctcttaagccgagacataaattgaagtaaaggttctggtgcttcatcaagctgctttaggcggggtaagtaattttgaaaatgttgttcccaatttttatctgtatgtaattgaaaactatgtcgaatagtaaggctgcagggaagttggctaagtaggttcgggctggcaattgtaaaggccaattgtcttaccattgggtgactgaactgtaaccatggctcaaaataggatgttttaattgaggcaatattcatacgttgagtactcgaaataattcatccaaatttcatggtcaatcaacaaaacaataccagaaaaacactttatactacgagtaacaatagcttaaggtttatatatgcgaacattgttttggcgaactctggtcgtgatttttatcacgcttggtattattggagcaattttaccaggcatgccgacaacagtgtttcttattctggctgcttgggcggcctcaaagggatggcctcagatggatgcgtggttgttaaaccaccccaagtatggaccaaccctgcgggattggcgagcaaatgggacagtaccgcgtaaggcaaagtggattgcaaccattatgatgaccgcaagtggtattctgatgctgtttacttcggcgccgttttgggtcaaggtttttaccgatactaccatgcttgttgttgcaatttggttatggctacgtcctgagccaaaattaaaagattgataatcttttaattttggcgcaagacaagtttccccataatttttcattaaagctcaaaatagttgagttgatataagagaagaaattcgatgtcccaatttaaacttgaagatgcagatattcttatcgatttagcaaatcaaactttaagcttacctaaacataataagttttacgtggtctctactggcaaaaatggaattggggaacaagaaaatacgggtaaaaccccacgtggatggcatcgggttgctaagaaatttggtatgcaatctcccaaaaatgcagtttttattgcacggcagcccacaggtgaagtttatagcagtgaattagccgcacaatttcctgagcgagattggatattgtcacgcattctttggttagatggtttagaagagggctttaacaaaggcgaaggccacgacacgatgcaacgttatatctatattcatggtacacctgataaagaaccgatgggggttccaatgtcacatgggtgtattcgaatgcgtaatgaagaaatcattgaattgtttgatttagtctctgaagacgcattagtttatttgtctgaacaatctttaacctaaaataggattttaaagattattgtttaattagccgaatgatcaaaatattaaaataagtgcttaaataaaatacaaaaaattgttttttacttaataatgacttatttttaatcattcattcgtatttttttgaaaagttgtcgaaaagcgtttgacacctgttaaagattctctataatgcacctcacaaacgatgaagacgttaagggcgcttagctcagttggtagagcgtctgccttacaagcagaatgtcggcggttcgatcccgtcagcgcccaccaagcctttacgttaagatctcaagtgcagcggtagttcagttggttagaataccggcctgtcacgccgggggtcgcgggttcgagccccgtccgctgcgccacttaagacttaacatcgtttaccccacaattgcgatattgtgaaagtgcagcggtagttcagttggttagaataccggcctgtcacgccgggggtcgcgggttcgagccccgtccgctgcgccacttttataaaacgcttttgcagggcgcttagctcagttggtagagcgtctgccttacaagcagaatgtcggcggttcgatcccgtcagcgcccaccataatttgtgaccatactttatttttaaagtattgcaagtgcagcggtagttcagttggttagaataccggcctgtcacgccgggggtcgcgggttcgagccccgtccgctgcgccattctcttgattccctgatctagaggatgtaatgtataaagactgtgattgttgtctttttcaatcagggcgcttagctcagttggtagagcgtctgccttacaagcagaatgtcggcggttcgatcccgtcagcgcccaccataattttttcaaatttaaaaaattaaacacgctaatttatttagtgttttttgcgtttctgctcttcctattttttatctatctattttatcttttttggttaactctctcttttccatacttaatttttgagttcgaattattattactatcgagtttaactaaagctgccatgctgtaacgcaatagcagctttgtaaactaagattaatactcatttagaagccagccactagcgtatgcaaaatattcacgtagccaagcgttgtagcgagtaattaaaggtgtttctgcagcgaccatataaacctgtgtatagccttgtttctttgcaatagctgcagctcgtggtgtatggaagtcacttgtaacaattgcaatgggttgattaacattaatatgagcttgttcaagtaaaggtttactatttttaagattaagttctgtacttgtgcttttgtcttcaaggatcattcgatcttttgctatatgaaaatgttgttccaagtagcgtgacatgactaatgcttcaggttctttttcggaaaagtctaaaccgcctgttaaaataacctttgcttgcggttgtgaaagggcaactggtgctgctgtgtcaagacgctttgcaagaatagctgaaggctgtccattttcgacaccacttcctaaaacaataattgctttaactgcggggagattttgacttgcgtctttattttctttaataaaattaaaaaaatagcctaagccaattaaccaaatccagaaacacaaccacccaaaacgccaaagagtatgaagccgatagtgatagaagaaaaaccgttctaaatgataataaaataatgcataaagacagaagaatgctcctaaaactaaaggaacaagtgtgcctacatgaattttatttagaaaagctagaaataagccgtccaaaaataaaattgaaccaatgactgctaagaaaatccgaatccacttactgacttgcattgtgtttaaagctgcaatttaaattgcagacagtgtatgcaaaatcattccaaattcaatgctgattgtaataaaaagccgagtaaagcattttggctattactcggctttgttatttattgatatttaataaacatcacggcgataacggccttgttgtcttaactcatcgacttgttcttcgcctaaaatatgaataagtgcttgatcgactccacttgccattccatcaatactgccgcatacatagagtactgcaccgcgttcaatccagttgattaactccgctgcattttgtcggatgatatcttgaacataaacacgttgttcttgatcgcgtgagaatgcaagatcaagtcgttttaacattcccatcgtttgccaagcttcaatagttgatgcatagaagaaatcatgattgcgttggcgttcaccgaaaattagccagttttcagtatagttatggcgagttcgtgtatgaagtaagctcattaaaccagcgattcccgttccattaccaatacaaataattggacgattatcatcaatcaaatgaaaagactcattggtacggatacgcagtgcaacattttgattaatttctgtatgttgagtcagccaacctgatcctaaacctaaattaccagactcatcatattgttgacgaacaactagacgtaatacttgctgagaagggatgctagcaatggaatattctcgcgttggtagggtaggaagttgttctagtaaatggtccagattggcaaacggttcaatttcaccagttaaatctttattccaaagtgccttttcaatagaaacctgtagcgagtctaccaccgcatttttaagaatgtgatgatgctgtaaaaacttattaatacgctcaggactgttacctggttgtatttcagcaatgtccccagcttgccatacagcttcatgactggcagtaagttcaatattgtaggcaggctgacctagactatttggattgagtaaatcacgttgttgtaatgtccaattatcaaacactttttcgatattaacagcatgcaaatctagtttagttgcttttacaagtgcctgattccagttttgaatatctgccggatttgcattatctacttctataatatcgaagaaggctttggcaccattgtttttaagccattcatctactgtgtggccaaaactacaataagtatccggatattccttagaacctaaagctaatactgcatatttgacatgttgaagttctaagttggtttttaataactttttagcaaaattagaagctaagtcaggtgcttctccagtaccataggtgctaatcacaaataatatttgttcatgttgctgtaaatcagcttcggttaattgttgtacagatttaacctgaactggttgatgcgcctcttgtaagctcgttgcagtactccacgcgagttgttccgcaactccagtttgggtggcataagtgattaaccaaggcttagcattttggtcgatataatggcctgctaaagactggcgagccgcttgagtaagttttttttgcttacggcgtttaaggtaaagcatccatccggtaacaaagaataatggcatggctaaagaagcaagcatcgccacaaattgataaactggtccgaagaaactacctcggtgcacaggtaacatactgctcataattttttgattaagctttttatcttcataaagctccattttttcaatattggcagttttatagttatagacagcttggttacgtgcacgttcatgttgtggcgttgcatctacaaaacttaattcaatttttccatcatcttttttaggtaagttaactgttaaagtcgaataatcacgtccaatctgattattaaaaccactccaagtttggttaagtgcggtaatcagttgagcattatctagttgaattttaggcaattgatctttatttcgcccagatccactatggccttgcattttaggttgttctacacctaatactttgaacataccactacgccaccagtcatatgaccaatatagacctgtacatgcaaaaagaagataaaaaacaataacccatgtacctacaacagcgtgtaaatcccaaataaaatttcgacctttaagtttgggcttaacagcaagccattgacgtgcagagtgctttttcggccagcgtaaatataatccgctcaaaacaaaatatatgagcattaaggcacaagcaccggtaatttgtttaccgaactcaccagcagttaagtttcggtgaatttgttgtattaataaaagtagtttacgaccttgtacctctggtaatacttgagctgtataagggttaaccatcatattgtagccgcgtcgttcgccttctttttcaatgtttactacagatgaggcggtaggatctttggcaattgtaatgctattaattttaatttcaggctggattgttgtgaaatgctggtaaagctgagcaggggtaagcttaggtgagctttgtgcttgcacaacataactatctgtatttacccattttaaaatttgctgatcataagaataaattgcgcctgtaacacccataatggataagatgaggccagcactaatacccagaaaccaatgaatttgaaataaaaactttttaaacatggtcgaataatgtaaatatgatggagatcttgtaacgaagtatagccgaagattgagtagataatatggattttggagataatattaattttcattatcatttatttttagcataataaaaaacctcctgtaaaggaggctttttaaagaggtgaaattataaagttttcggttcacctacactttctttcaaatgcttacgaattgtattgaaagaaaagtttttagagtccatacgtttaggcaatatatatgcaccttgttgttcctgacctttaggatcttttactttaaagttaactaaaataaagtcaggggtgttgtaccattcatagatatttttccatccgatagttccaacaccttcttgtaagcccatttgctggcgcattacgataccgtgaggttgtacacctaagcgaatacctttgatttcctgcacaggaaactcattcatcttacgcttaacgtaccattccaaaccatatttgcggcctaggtaataaagtactacacagacaatagcaacccagcaaatcactgtagagtagttcttgataaagataagacctaaaatcgcaagggctaaaattacgcccataatcgcccagatttttgtgctgattttattggtgctgcgccagataagaagttgtgcattacgttgctcagcttctgatacctcgtaaggaacaggctgaagcgtataagcatataaagttttcgcggtcatagtgcaaataacaaattgtaaactgttttaagtttagcattaattggcataagtcaggaaaggatattatgccaatttcatactaaattctgactcaaatttataatgatgcaagttcgctagcatcattatccagatcatgacttagcctttgttttaacatactaaatcgatttaatacactgagcatcaacgataactgctgtaaaataatgagcgatttttggtcatcttcatcattttggcttaagcgctgacgtatcgtctgtagcatattttgtgccgtaagatcaggcatttcatctcttaacaaagcaccttgtatatcatctaaagcttgatctaatacgttaagaaccgcttgatcctgaatcttttctcgatgtgctccaagtgctgcgatataacttaaaaatgtatgattgaggcataaaaattcaaatatatcggatttacgagtagggtcgaagtctggctctgttgctaaagtagaaataagcgaagcgacttctgcatcagtattatgtgctgctcggcggacaatacggtaattgagggcatgattatgtccttcatgatattgttttaccacttcagctaaataattacattgtgcttgtaaggagcgtcgaatactgcgtggtaggcgacggaatttccagtcaggccaaataaaggtcacgccaaaccatgctaaagcacaaccaattagggtatcaacaaacctaggaatagccgcagcgactgccgaaccgtccagattaaagttaattaatgccaaaatggtaataaaagcagttgcttgagcatattgcttactacgtaactcgaaaaacagtacgccactcaaaattagcatgactaattgcccttccacagaaggtactaaaaatactatgctaaggccgacaataattccgactaatgtacccacaatacgtaaacgtaagcgacgttttgttgcgttaaagttaggttggctaacaaataaagctgtcaacataatccagtagccatattcgatatgagtcatttgaataaatacatatccaataaaaagaacaatcgaaacacgaatggcatgacggaacagtacagattcaggtgttagattttgttttattcgaacaacaatatcattccaaccttttagatcatcatctttaagttggttttcagcctgctttactttgtcagactgaatatgctgttccgtttctaagttgagtaattgtgagtcaatagactttaagtttcggtataaggcaaaaagagcatttacccacaataagtcatactgctgatcatttcttaactttactaaagataagcgtaaattctcgaaactctgcttaaagcgtttgttatggatatagggtttacgctgtaaaatacattcatttagctcttggcaagctttaccctgaattgccaaaatgcgctgaaacctaaataaaatatcactgtgctggaaaattttagctaacttttgatagtcgatatgggcagaatctgcacgttcatgaatatcttgtgcgacaaaataataatgtaggctacggcgagttcctttttgtccacggtcaccttttaaacgggttaaaagggcggttttaagatcattaaaaatcgttattaatttgccattttctaatgaaagatcaatcatgctttgctgataactcgcaggagtcatatcgacatcaaacaaattggatttggcaaatagaaagtcgcctaatgaagcataagaggccgcaagtttatcttgaagttggcgaaccggaaataataaaaagctaatggttgcaataagtccgtaccatgctgctcccgcaaccaaaagagctggctgaatataccactggtcaaataaatgaactcccagcatggtataaactgaaacaaccagacatccataagaaattgttgcgtaacggcggcctaatgaccctagtaaaatccagccaatacaagaggcaatcagccctagtgcaaaaagcattggataagggaaaagtaattgtacggaagctgcggtaatgaagaaaccaatataggtgtaaatcaaattcatgattcgcactgaaaagcgatcatcaatatcacttaaaccagctgcgaccacacctaaagtgaggggaattgttgctaattgatgtcctagaaaataaggcacgaacgcagttcctgaaaaggcaatcagcatccgcacgttatacataaatgaagtgttataagtcgctctttttaggcgtttaaaccaagatttcaaatgaagtccttgctgatcaacctgagtgataaaggatttgcgtatttctacaccaatgttgcacaaatcatacgatagacagtgtaagcttgtctgtatgcaaatgattgaaaaatgaaatatcgttatgtctgaacaaacagcccagcgtcaatattctattggctggattatgttgctcgctttactcacggctttagggccattatccattgatatgtacttacctgcgttgcctcaaatggcccatgattttggggtgagtacgcaaatggtagcaaacacattaccagcttatttttttggtttagccattggacaattggtgtatggacctttaagcgaccgtattggtcgaaaaaagcctctttattttgggcttgcgctttatgcagttgcaagcttgttctgtgtgctcgctacaaatgaatggagtctaattgctgcccgtattttacaagccttaggtggttgtgtgggggtggttatggctcgtgctgctatacgagatagattagatgtccaaggctcggcacaagctttttcaagcatgatgatcgtaatgggcttagcacctattttggccccgatgattggggcctggatattaatctggtttccgtggcaagcgatttttattgcgctttcaattgtaggggcaatctgttggctatgtgtacatttcttttttaaagaaactttggcagttgataagagactcaagttatctctatatcaagtggctaccttatatggtgctattttcaaagatgcaagcttccgtttacctatgtttgcaggatgtttaacaggtgcagcattattctgttatatcagttcagctccagccgtttttatggaccaatatggcttaaatcagcaagagtttgcttatgtattcgggctcaatgcttttggcattatgttaatgtcatctttaaataagcacttaaccacacgtgttgaaatcactaagcgcttaaaagcaggttcaatggtacaagtgacaggtgcaagcattgtgttgattgctggcttaatttctgcagcacctttatggctagtaatgttaggactgttcttagcaatttcaggaattggtttaactggaccaaatgctatggctctagccatgtcaaagcaaggtgctcgtgcaggaacagccagtgcaattatgggcagtatgcaatttgcttgcggtctattgggtggagtactgcttaacttccttatttggtctgcatcactcaatatgggagtgatgatggtgttatttacattaagtggttttattgttgttttaaaagcgattcgtcaagcaaaaagccaatcactctcttgattttaagagagtggcttgcttgcatctttaatcaagaaaaactgcaaaattctcaacaggctctctaggcgtaataaaggtattcacaatatgttcagggtcggcatgacctagtgcaattgcacataccaactcttcgtcatctgctgcgcctaaaatatctaacactagcggatggaaatggttccaagctgcttgagggcaggtgtctaatccccgagccttggcagcgaccatgacattttgaatcatcatggcgatatccattttggaaccaattcccattgctttattgactgtaaagaaaattccgactggagcatcaaacagtttgaagttacgtaactgttgagcagccattttttctttttcaccttttttaatatctaacaaaccgtagagtccccaaccattttcacggcggcggtcaataaaaggagagacccatttttcagggtaatatgcaaaagtttctttatattgctctgcaagttcgggatttttggaaacctcaatctgtgctgcacaaacacgctctaccatttcatcacgtttatgacctgtaactacataaactttccacggttgagtgttggtaccagaaggtgctcgacttgcgactcttaatatatctttaatgacttctggctcaatgggagtgcttaaaaaagcacggacagaatgtcgagaggtaattgcttcgtcaacaaggcggacttgttccaaattcatgagtactcctgatctttttcctcaatatttaatactttttgagatgcaattttatatgctgaaattgctgtatttataagcaaaaaatattagaaaacagatatccttatatatatgattaatgacttgggtaagacatgatgtctgctcaatgataattcgaatatgccactttaggcttaaaatggtaaagtggtgcgactttgatagtcattcgattaaagccaaaataagggttgagtgaaaattgctcaattagaaaaaaggtataatatgtttaaaaacagtacaaaacagatgtttttgcataaaaaataatcttaagtagcataaacttttaatgaaaaacatacacaaaattttaaatttctgcataataccgacttttttacgcaggtatgatttctccatactcacgttaggaaaaaagtagtggctgcaaataaaatacttttacagaaaggattttgtgcagaaatggagaaatacacgaggtataaggagctttacatgagtttaccgctcatcaacaagcagttcatgaaacaaggattggcgattaccattgcaaccatgaaaatgaacgtaactcacgcaactactgagccacaagaaatacaacagcttggtacagatctcaatgcactcttctttaatgaaaaagaaaagggtacagatagtcgtgttatgacgatggcttgttacagtctttgaaatttaaatccagtttagacattcgcccaaaagtatatgtaaatatgcttattggcttaaatccagtttttataactcgattaattgatgggaatcattaaacgagctgatttagcggtggtcatttgttagtttccaagtttgtagccgagtcgatgcattctgttcacccaaatgggaatatgttcagtggtgcgatgaatttattttatctgaagggtgctttctctcatgtaaccttcaaaggcttagtgctgggcatgatgttgcttaaacttgtgacggtaattgctattcaagtgacattaaaagtttttccttaaatgtactgaagaagtccctatttttaggggcttttttgtttattgcagtattttggcttgtgctaatagcacattagcaagaacgtaagcggaccgagtatgaatgaacaactcaatgccacactgatgtcgtgggtacaattttttaatgaacctttatgggattttctggttattttcttgctggccgtcggtattttttatacggtcttaacaggagcagtgcaaattcgcatgttcttgcaaagtattcgtgttatgaaaagcagccgtacagaaggcgaagatgagcatggccttacacctttccaagcgtttgtaactggtcttgcgagccgtgttggggtgggtaacattgctggtgtggcaattgcgatcgcaattggtggcccaggcgccgtgttctggatgtgggtaaccgctgtacttggtatgagctctgcttttatcgaatctactcttgctcaactttttaaggtgagagacagtaatagcaagcaattccgcggtggtccagcctactatattactcaaggtttacgtagtaaaacttttggtgtgatcttcgcattagcattgatctttacttatggttttgtatttaactcagttcaaatcaatgcaattgctaatgcatcttcacatgcttggggttgggataaagctaatcttattgcgcatttaggtggtgttgatttagaaatttcatgggttggtcttgctcttgttgtgatggttgcattagcaatctttggtggtattaaacgtatcgctaaattcgcagagatgtttgttcctttaaaagcaggcctttatctctctgtagcgttatatattgcattaagcaactatgcgattttacctgatgttttaaaactgattgtgactgaagctttccactttaatgctgcggcaggtggtttcttcggtgctgctgtatcaatggcaatgatgcaagggattaagcgcgggttgttctcaaacgaagcaggtatgggttctgcaccaaatgcggcggctgcgtctgatgtaaaacatcctgtaaaccagggtttggtacaaatgcttggtgtattcgtagatacattcattgtatgtacaagtacagcaatcatcattttagtttctggtgtttaccaagatgctggtttcgtcggggttgaattaacccaacgtgcactagagactcaagtggggcactggggagctgacttcttagctgttctattattcttgttctgttactcagctgtactaggtaactatgcttatgcagaaagtaacgtacagttcattaataacaacccgaaagtcatgttcatcttccgtatttttgtattggtgatggtgtatttcggtgcaattggtagtgtgccattagtatggtcaatggcagacttgtttatgggtattatggctaccattaacttggtcgcaattttactcttaacaccaatggctcgtactttattgaaagattaccgagcgcaattgaagcaaggtattaaagaacctgtatttaaaattaataaatatccagagttgaagaaaaaagtcgattcagatatttggtaattttgtaagaaaagcctcttagaaataaggggctttttttcggcataataaaaatgcttgagtataaaaattaaacatgacaaattaaataaattcactacagcatttcacaaaacgagcaactaaaattgcaattcgaaaattaacgtcatagtgcaaagatgggccatgaaacagcttaaattgtgggttctcggactttctatggtgttggccgggtgccaaaccacctcacacttatctgccttaaaaccgcaaacggcagaggcatactcacgtttcgtcgatcagccttttgcacagcttaagaagcagcataagaaaccagtagtcgcattagtactaggtagtggtggtgcacgaggttatgcacatattggtgttattgaagttttagaacagcatggtatccgtcctgatttcattgttggaaccagtgcaggaagtattgttggggcaatttatgcgagtggaaaaacgcctgatgaacttcgcgatactgcattgaaaatgaaagctgcagatgttcgtgacatcagtattggtttaaaaggtttttttgatggcaaaaaagttgaagactacgtaaatcagcaagtaaataacttgccgctcgaaaaaatgaaaattccgatgtatgtagtggcaacagagctaaagcatggcaccaaaaccgtatttaattatggcaatacgggacaggccgtgagagcatcagcctcaataccaagcatgtttgtaccgactaaaattggtaaatctgaatatgtagatggcggtttagtcagtccggtacctgttgaagtagcccgtgatttaggagccgatgtcattattgctgtcgatattctggctcaacccatttatacggaaacctcaaatgtatggggactctttaaccagaatattaatattatgcaaggacgtttggctgccgaagaacttcaatatgcagatgtagtaattcaaccggatttaagagaaaaagcacatatttttgatgtaaaaggccgtgaagcaaccatgaaggcaggcatagatgcagcaaatgcaaaactgtctgatattcagtttgcgattgatgaaaaaatagctgaacagaatctatctactgacggtttaagtgcgcaaacgcaataaattaaaagcaagtatatgaaaaattaagtaaaagcccgctaagggcttttttgttgaaaaataaaagatttgtatgtgctgacaaaaatttttgtatagtggagctatgctgaaaactactcatgacacatatgagatattcatgctatttttcaaaaaaataattgatttgtaacatattgaggccagctacttagatgattcagcaacaggtaaaaaatgagtttccaacattagaagatatacatgccgctgcagagcgtttagatggtttagttgttaaaacaccttttgttttttcagaaaccatttctaaaactttaggggctgaaatgtggctgaaatttgagaatctacagtttacggcttcgtttaaagaaaggggcgcattaaataaacttttgagcttatctgaacaagaaaaacaacatggtgtaattgcagcttcagctggtaatcatgcgcaaggggtcgcttatcatgcacagcgcacaggagtcacggcaactattgttatgccaaaatcgacgcccaatgtgaaggtgcaacgagtacgtgaatacggtgcgcgtgttattttgcatggacaagacttttcggaagctgctgctgaaatgcaccgtgtggcacaagaagaatctttaaccattattcatccatttgatgatgctgaaattattgcgggtcaaggtactatcgcgctcgaaatgctggaagctgttcctgatttagatatcttggtcgtacctattggaggtggtggtctcatttctggtattgcgattgctgcaaaatcaataaatcctaaaatcaagattattggagttcagtcggttgtttatccaagtatggcgaaactgctttgtaactatcaactcgcggtttcaatgggttcaacggtagctgaaggtattgcggttaaaactccgggtgagctgaccacacaaattgctaagcattttgtagatgatattgtggtagtcactgaagatatgattgaagaagcgattgcgctattactcaacattgaaaaaacagtgtgtgaaggagctggcgcaactggaattgctgcaattatgtctcgtcccgatctatttttaggtcataaagttggtgtggtgttatctggtggcaatattgatacacgcgtaatggtttcagtattacagcgtcacttaactcgtactggccgtatggttcgtattcgcgttgaattaccagataatccgggtgccttagcgcgtctaacagcaattattgcggagcagggcggtaatatttatgaacttcgacatgaacgctttgcagcaacaagccgtgctaaagaaagtgcggtgagtgtcgatattgaactaaaaagcgctccagatctggaaccattaattcaggctatgcaacttgaaggctatattgttcgtaaagaagagatttaaacgtacatatggctgtgatataaaaactgtatatggctcttaggggagccatatacaaagcaatttaaacggattaaattgcataaagggatgaatttacaaaaaaacgatcaaatccttcaatgaaatgggaaaaattgacaattctctaaactttagccttcacaattttaaggtttaggttttagtattcctttcattgtaaatttgaagaaatatagggatatcaacactcaatgttcaaatcattttttccatcaccacgatatttctttatatctgcggttatttggctcgcgctaaatatggtgctctggtatacagggggagatcactggggacagtatcttggctttcctcaggggtatgcagatgctgagttgcctattggggtaagtcgcttctggtcgcctgcttttttatggttttacctctggtttttagtctccacagcactgtttgctagcttttggaaaattatatcgaataacccatggcagcgttggtctatctggggctcggcttttattttatttaatatctggtttagtgttcaggtcagtgttgccattaatgcatggtatgtaccattttgggatttaatccaacaaatgctttcaagtggagggggagatctctctgcactttatagtgaaactctagtctttctttacattgcaatggttgctgtgactttagctgtgattaatgctttttttacaagtcactatgtatttcgttggcgtacggcaatgaatgaatattacacggagcattgggaaaagcttcgccatattgagggtgcttcacagcgtgtacaagaagataccatgcgctttgcaacaattttggaagacttaggggttgagctggtcaaagcagttattacattaattgctttcttaccaattttatttcagctttctaaacatgttccagttttaccaattgtcggcgagctagaacactccttggtatgggccgcaattgtatggtcaatttttggtactgtcctactcatggtggttggtattaaattacccggtctacaatttaataaccaaaaagtagaagcagcttaccgtaaagaattggtttatggtgaggatcatgcagatcgtgcaaaacctgctactttacgtgagttatttagtaatgtacgtaagaactatttcagactttacttccactatgcctattttaatatgacagcgatttggtatggacagcttgatattctctataatttggttgttcttttcccatcgattgctgctggtaaactcacattaggtttaattcaacaaattgcgaatgtatttggacgcgtacgtgaatcatttcaatatttaattacttcttggaagacgattattgaactactttcaatttataagcgtttaaaagctttcgaatcgatattacataagtaaaaagagcccgcgaaagcgggtttttttatgattattgatttaatgggttgcattataaaaattaaggatagggccaactagagactgctgcgacttatctaaggtgacttgaatctctttatagttaaaagtgtcttcatcatcatacttggcaataccatgggttttattgttcacttgaggaatttggtagctaaaaaaagcgacttttttagagggatgaacaatattgataaggtttttagggtctttaaaaccaccatattcattttcaagactttcttttaatagttcaggaaaataaagcgttgcattgggtaatccacatccaacgcaaaatgaagagtcataaagctttatcgcttgcttttgatctggactcatgattagagcaaaaccagttccatttgcgcctgcatttgcttgaatatcttgccagttacgtggaacaagtactacacctacttcaggtaatgcaagaagctttaattgcttggcatgttgagcatcaagtttaaaattaaaactacagcttttaggcgtgcatttttcaaaacttttaagtaaaccatcttctattgggttttgtgccgtaatgccataaaaagggactgcaacgccgtttaaaaattttgcctctccaagagcatagaattgattgtctgctttgcgggttgtagcagagctataaaatttggggaaatgaggagtaaagctttttacttctgcataagcagttgaatttaggctgactaatgttgcccataataaaaaatttagttttttcatttttagaaagtaatcaatttaaattttatataaatctaacatattcttttaaactaggcggtaactcaaaatttaacactgttgttaacttcataataaaacagacgtgtagagacatgaaaaaatgaaaaatatactttcaatttgttgtttggcagtaataagttcttatagttttgctcaagatataaaaggtatttcattttctcaccaagagtgggaaatctcttgcagtaatacgggtacctgtaaggctgcaggctatcaaaacgaagaaaatggtgataatcccgcttcaattttattaacacgtaaagcaggcccaaaacaacctgtacagattggatttgctttgtctgactatgaacaaagcatacctgcaaaccagcttaaaaatatccatttttatataaatggcaaagatttaggtgcagtgggtgtggacggtactgagctgccaattatgggtaagctaaacagctcgcaagtcaatgctctactacagcagtccaaacagaagactgaaattgtatttaaaaatgcgcagcataaatggaaagtttccgatgctgggatgactgccgtattattaaagatggatgattttcagaagcgtatagggactattggtgctttggttaaaaagggcagtgccaatgaaaatcaagtgcttatgcctgaaccaaaactagttgtgaagcgtattaagacttcaaccaaaccttatttaactttacagcctaaaaataaacattaccaagcaatacaccgtagtttgatggctgctaaaccgaatccgaaagaagacggcttttgtaaaggtatttatggtggtaacagtgatggagccgaaccacagaaaattgagctatataaattaaccaataagaaagttctggcgactacattgtgctggagaggggcttataacgaagggtatggggcatgggtactcgatgagtctttaaacggtaaggccgcgtttgtgactgagtccgcctcagattttgatagcggtattattagtagtgctcaaaagggacgaggcattggagattgctgggcaagtgaagagtgggtatgggacggcaagagttttgtgcatactaaggatatgtggacgggtatgtgtaaaggcttggcagcaggtggagtgtgggagcttgatcgaatagagtctgtggtgaaatgactactttgtggttacagagtcataacaggtaactttagtgactctgtgataaaaagaacagattgtttattggagctagacctatgtcacgtcatctttatgctattgctcgccgtaagttttcacatctgagccgttcaatatatgtggcggcgactgtactgggtgtaacacaaattgcgatggctggtccaacagttgatcagctcagtgattgtttagttaaagcaacgacagcttcggataaaaccacagtgctccaatggacatttacagctttagcagctcatcctgatttaaaagcatttagtaatgtaacgcctgagcaaaaggatcagttagatcaaaaactggctcaggttttacagcggataattgtagagcaatgttctgctcagaccaaagctgtaattcaggctgaaggtgtgaaggctgttggggaggctttccagcagttaggccaaagtgcgggtgaagatattgttaaagacccagccgttaaacagcagttgcagggcacattacgctacatcgatttaaataaattggtgacaacgtttttaacaccagaaatttggaataagttgggaattacaagataaaaatctagttttctattttagtaataaagcctgctatctaaatgcaggctttattgtatttggggtgaagaatcttatttagatactaatcttagcgcctaaaactttcacaaattgtgctaaccaagctggatgtgcaggccaagctggagcagtcaccaaatgaccatctgtaactgcttcagtcacagcaatatctgcgtattgtccacctgccaattttacttcagccgcacatgctggataagccgagcagaggcggtcttttaaaatgtctgctgcagcgagtaactgagcaccgtggcatacggctgcaattggttttttcactctatcgaattcacgtacaatttcgacaacacgttcattcatgcgtaaatactctggcgcacgaccacctgggatgactaaacctacatagtcttcggtattaacggcatcgaaatcatagttaatcgcgaagttgtggccacgtttttcgctataagtttgctcaccttcaaaatcatgaatagccgtcgcaatatgatcgccgttttttttatttgggcaaaccgcatgcacggtataacccaaaccagttaagaactggaaaggaaccatagtttcatagtcttctgcatagtcaccgaccaacattaaaatctttttagacatgatttatctctcttatttaaaatatatgtgatttcaatttgtaatttaaattagcacaatgaaagtatgatttttagcaaaaagtgcattctttagtcgaagggtggctgaagttagggggtgagaataacaaatacagtttttgataattcactggtattagttacgtgataggctacatggatgtcgccgttaggcagaggtatcagagatgtgccttctgcctaacagatggttttgttacttttgccaaaacaaaagtaaagctattttttttaaccaaatttctgattatctaggaaagtaattaaatctttatttgagttaatttcatcggcttttatttttgatattatttttattatactcatagctaagtagtatcttatttgctttaactctttggtttcaatatttatgtttccaccatgtgcaataccactacgttttgcatataaattgcacatagtgttgtaaactagttttctactttcaatgtcatctttagctattaaaaaagcagtgttttcagctaatacttttgtaatggagtctctacctgtagttaataatgattccattccaatagcacagaataaaaagctctcatttaaactttccgaattaatggatgcactataccaatttatagaaacacgcaatttctctaataagtcattgttaaagctattagttagtataggaaagcataattctttaaatttagaaccaatattacttagactatctatattattcctttgtgaaaagctaaaatcgacattgtaaataatttcatcacttaatgcgctagtacttaattcgtcataatttacgcataatggttgaattctatctttaacttcataagtatgtacttgaatgtggaatttataactttttgatatatgagtgatgaaaataatttgatttattaactctttagcatcatttttacttttttctttggccattaatgggtcgccaagattagaaatctcaataactgttttatttttatatttttttattgtattttttagctcttttaaaaatatatctttgggattaaatgtcccatttctttttcgctcatctatgactagttttatatttttatttattttttctgagaaagaaatgttgtttgagtttttttcattaaaatttccaagagttatattttcaaatgaatatattttatcgcagtttaatccttggataatgaaatagaagaaattagttttttgactataaattttcagttctgaaataactttattaaactcagaaaatatatctaaactactattctgaacatattctttgaatagtttttttatttttttatctatagtttccaaagctattaaatcaattagattggttgtttttaatatagaggtaagaaatacagtccaattaagagatgtttctattgagaaaccgtaacttatatcacttaaagtagcaaagccgcctgaagccatggctgtatgaaaatcaagcatattgtctttaaaataatcaaaatatgtaattatagatcttggtctatctatttttattttattaaaatccataaaaaaccccactttaagtgaggtttttatcgcataaaaacaatgaattagtcaataaatcaaccaatcaattttttcattaattcattgacttgcgcaggattagctttacccttagatgctttcatgacttgaccaacaagaccgttaaaggctttttctttaccagacttgtactcttcaaccattttttcattggctgcaagtacttctttaatgattgcttcaattgcaccagtatcggtttcttgctttaagcctttttccgcaataatgtcatcggcagatttaccttcagattcccacataaagccaaagacttgtttagcaattttaccgctaatggtgttgtcgataatacgcgcaatcatgccgccaagctgttcagcagaaacaggtgagtctgttaactctaagcccgctttgtttaaagcaccagagaattcacccattacccagtttgcagcaattttaccttgcttcgcaccgccagccgcagcaacaacagcttcatagaagtccgccatttcgcgtgagagcgtaagtacgtgtgcgtcgtattcagttacgccaaagtctgcaataaagcgtgcacggcgtgctgctggcaactcaggcatagttgctttgatggcctcaatttgctcatctggaataattactggtagcaagtctggatcagggaagtagcggtagtcatttgcttcttctttagaacgcatagaacgcgtttccattttatttggatcgaacaaacgggtttcttgatcaatttcgccgccccattccaaaatttccatttggcgttcaatttcaacattgatcgcttgctcaatgaaacggaatgagttgaggtttttaagctcacagcgtgtgccaaacggttgtcctggacgacgtaaagacacgttacaatccgcacggaatgaaccttcagccatgttgccgtcagaaatacctaaccaacgtactagtgtgtgaattgctttgatgtaggcaactgcttcttcaaccgaacgcatgtctggttcagaaacgatttcaagcaaaggcgtaccagcacggtttaagtcaatgccagacataccttcaaattggtcgtgcacagacttacccgcatcttcttcaaggtgagcacgagttacgccaatgcgtttagtcgtaccatcttcaagctgaatgtcgatatggcccaagcccacaatcggattgtccatttggctaatttgatagccttttggagagtcaggatagaagtagtttttacgtgcaaatactgaagcttggtcgatgtaagcatcaatccctaaaccaaaacgaattgcgagttcaaccactttttcatttaaaaccggcaatacacccggcatcgccaagtctacaaggctcgcttgtgtatttgggtcttgaccaaattcagttgatgaacctgagaaaattttagaattggttgcaagctgagtatgaatctcaataccaataacgacttcccaaccgtcaatcaatttcaacttttgagcttcagccattatgcattctcctcagcaattgccgcacgtttggtgtgccagtcagtgttttgttggtattggtgaacaatcgacaacaattgtgattctgaccagtaattaccgattaactgtaaacctactggtaagttgtctttatcaaaaccaacaggagcattaatcgctggcaagcctgctaagttcactgcgatggtatagatatcgcctaagtacatttcaacagggtctaaagatgcaccaattttgtaggcagttgttggtgcagcaggtgctgcaattacatctacattttcaaaagcttttaagaagtcttgttgaattaaacgacgtactttttgtgcttttacatagtaagcatcgtaataacccgcagaaagcgcgtatgtaccaattaaaatacggcgttgaacttctggaccgaaaccttctgaacgcgaacgtttgtaaagatccatcaagtcagctgggttttcacagcggtaaccgtagcgaacaccgtcataacgtgacaagttagaagatgcttccgctggcgcgatgaggtaatacgttggtacataagcttcagtcatgttgaggtcgatttcaacaagcgctgcgcccatttcttcaagctttttcaaagactcttcaacacgtgcttttacgtccgcatctaaacctgcaacgttaaagtattgtttaggaataccaatgcgtaagccttttacagatgtgttatttaggtttgcaacgtaatcatcgacttcttttttaaccgaagttgagtctttagcatcgtgacctgcaattacattcatcaggtaagcacagtcttcagcagagcgtgccattggacctgcttggtctaatgatgatgcataagcaatgatcccgaaacgagatacacgaccataagttggttttaagcctgttaaaccacagaaagaagcaggttggcgaattgagccacctgtatcggtacctgtagcaaatggtgctaaatcagccgctacagccgcagcagaaccaccagatgaaccgccaggaacatggtcaagtgcccaagggttactcgttgcacctacatatgaactctcagaagttgagcccatcgcaaactcatccatgttcactttacctaaagtaaccagaccagctgctttagttttttcaacaacggttgcatcgtaaggtgaaatgaagttatcgagcatttttgaaccagcagtggttttaatacctttggtacaaaagatgtctttgtgggcaagaggaatacccgttaaagcagttgcattgccagcttttaatgcggcatcggcagcatcggcttcgcgaagtgcctgttctggagtaaccgtcacatagctcttaacttgcggatcgattttagcaatacgttttaaataatgttcagtcaattcgcgagatgaaaacttcgcttggcttaagccttcagcaagttcgcgaattgataagcgatgtaaatcagtcatgagtaaaatttctttacattcaaaatagggaagatgggttaattgattaaaagttattcaatcacgcgaggaacaagatacaaaccatcttgagttgcaggtgcaactgcttggtattcgtcccgatgattgctttcagttaccacatcagcacgtaaaggttgaggattgtcaaaaggactctttaaaggttctacgccttccgtatcaatgccttttaaggtttccatcatgcctaaaattttatttagactttgagcatattcagcagattgcgtatcattgagcgacaatcgagcaagattggcgattgctgaaactgtttgtgcatttaaatctgctgaatgctgtgcatccgatgtagacataacatcacctaatcagtattaaaaattttcaaaatatcgtgcgttataataagcgattgacttgttcaaatcatcacatttagtttaaagttgccaccttgcatccacatgaaagtttaactgagaacgaaccgtgattctaaaacgactaattggcttgttttcgccggatctagccattgatttaggtacagcaaatacacttatttatgcaccaggccgcggcattatattaaatgaaccaacagttgtggcaattcgtcacagtggttcacaaaaaattgttgctgctgtagggctagatgctaagcaaatgctaggccgtacacctgcgaatatttctgcaattcgtccaatgaaagacggtgtaattgcagattttgaagtgactgaaaccatgttgaatcagtttattggtaaagttcacgaaaaacgtttgttcccacctgcacctcgtgtagttgtatgtgtaccatgtaaatcaactttggtcgagcgccgtgcaattcgcgaagccgtatttaatgcgggtgctcgtgatgtacgcctaattgaagagccaatggctgctgcaattggtgctggcatgccagttgaacaagcatgtggttctatggttgtggatgttggtggtggtacaactgaaattgcaattatttcattgcaaggttgtgtctatgctgattctttacgtattggtggcgatgtatttgatgagcaaattatcaattatgttcgtaaagctcacggttgcgtaattggtgaaaccacagctgaaattattaaaaaagaagttggtatggctgtttctgatggtacgacattagaaattgaagtacgtggccgtaaccttgcagaaggtgtacctcgtgcaattaccgtaacttctgacgaaattactcaagcaatttctgacccgttacaaagtattgtaagcgcggtgaaatctgcacttgaacaaactcctcctgaactttcttctgatattgctgagcgcggtattgtgttgacaggtggtggagcgttacttcgtaaccttgataaattattagctcaagaaaccggtttaccagttgttgttgctgaagaccctcttacttgtgtaacccgtggtggtggtaaagtattggaattcttcgacaacccgaaccatgacatgcttttcgtcggttaagtttaaggattaggcggtgcaaccgaatattttttcaagacagccgccatctttccgctcgttcattattgcggtcattacatgcttggtggtgctgttctttgattggcgcatgccttatgtaattcagccagcaagggatgtcttgtacgctgcatataatccaatatatgcacttgcaagttatccggtactgtcgagagaatggctgaatcaacaaactaaatctgaaacacaactgcgccgtgaaaacactgcaatgcaggctgagctattacaggctcaggtccgcttgcagaagctgtctgaattatctgctgaaaatacccgcttacgtggtttactcgatacaccattaattattgatggtcgtatggaaattgcggaagtgattgggacagatgccgatccacttcgtcacattattattatcaaccgtggtgcaatggatcatcttaaagttggtcaaacggttttagatgataaagggattatggggcaaattatcaatgtatatcctcatagttcacgtgtgatgctgctttctgacaaagagcattctctatctgttcgtttagagcgtacaggtatgcgtgcaattgtctcgggtactggtgatttaggccgtttaaaaatggaatatgtgccaacgagtgcaaatattcaggtcggcgataaagtattaagttcaggcttaggtgagcattttccagcaggttatgccgtgggtacggtggctaaaatccgtcgccataattcaggtgagtttgctgaaattgatgttacaccagcagcacaattagcaactggtcatcatgttgttgtacttttctctgactcattagcgaaggagcaaccatatgccgatcgctaagttgaaacgtgagaagcgtaaagatccattatggggaattattctctctataatcgtggggtctgtcctcatgatctatccattatcttacgacatctcgggctggcgaccattgttcatgcttatgatcatgttgttttgggttgtgtgccagccaacatggtgtggggtgtggttcgcatttggtatggggatttttacagatctattgcttgatgcacctttaggattaaatgcactgagttttgttattgtcacgtttattacccgatttttaatacgcgaacgccgtattttgacttttggtaatttatggacgattgctacattggtgattattgctcacttagcgtttatgtgggtgactcaaacgatggggggcattcatttttcgattgctcgacattggcaaccattgatgacaagtatcttaacctggcctgttgtctattattgtttagcaaaatggcgcatttagttttagcttctagttctccgcgtcggagagagttgttgcaacaactgggcttaaattttgaaatctatagcccggatattgatgaatctgttcatgaaggtgagctggttcaccaatatgtagagcggttagcgagagaaaaagcccaagctgtattaaacatttttccagattcagtgattattgcagcagatacgagccttggtctggatggtcagattattggtaaacctgactcaaagcagcatgcctttgacatctggaaacaattatctggtcgttggcatgatgtattttccggaatttgtattgcaacacagcaacacatcttaagtcaggtggtgcagacccaagttgagtttgcatctctaactacgcaagatatggaagattactgggccacaggagaacctgtagggaaggccggtgcatatgcaattcaaggaattgcttcacaatatattcccaaaattcaaggaagttatagtaatgtggtagggcttcctttgtacgaattttcacagttattcaaaagagtgaagacataaggggttgttgataattcttgattgaattgcattgtcgatgaacaatggacaaagctacattaacagtccctctgactctttaataaaaattttataatgctttgagtttatgtatgtcagaagaactacttattaatgtcacacctatggagtgtcgggtggcattaatcgaaaatggaactgttaatgagctgtatgttgaacgtacagttaaacgtggacttgtcggcaatatctacaaaggtaaagttgtacgcgtgcttccgggtatgcaagcggcctttgttgatatcggtttatccagaacggcctttttgcatattaatgatatggtttggccacgttcacagccaactccaaatgtgtttgaactacttcatccagggcagattcttaccgttcaggtgatgaaggatatgctcggtactaaaggtgctcgcctgagcacagatctttcaattccttctcgctatttagttcttatgccatatggtaaccatattggtgtttctcagcgcattgagtctgaagaagagcgtgatcggctacgtaatattattgagagcattcaggcggagcataatttacccggtagcgtaattgttcgtactgctgctgaaggggtagatgaagccgaaattgcacaagatatgtgctacctcagtaagttatgggaatatattcagcgtaagcaagttgatgtggcagtaccttccttaatttttgaggaactaccgctaccgcaacgaattatccgtgatctggcaagtgaagaaaccgcaaagatttatgtcgattcgagagagattcatggaaaactgcgtgagtttgtagatgagtttgttccgaatatgcaaagtcgcctgattcattacccgggtgagcgtccattatttgatctttacaacgttgaagaagatatccaaaaagcactgcaaacacgtgttgctttaaagtctggcggttatttaatgattgaccagactgaggcgatgaccacaatagatgtcaatacaggctcttatgttggtggccgtagccttgaagacactgtctttaagaccaatatggaagcgactcaggtgattgcgcgtcagcttagactacgaaatctaggcggcattatcattattgattttattgacatgcaagaagcgattcatcgtgaagaagtgatgcgtcaatttgaaaaaatgcttgaacgtgatcatgccaagaccaaaatcacacaggtttctgaacttggtctggtagaaatgacacgtaaacgtacacgtgaatcattagaacacttgttatgtgaatcgtgtccaacgtgtcaggggcgtggttttgtcaaaactgcagagacagtgtgttacgaaatatttcgagagatattacgctacacccgtgcatttgagtctacgagtggctttactgtcgttgctcatccatccgtgattgaccgattattaacagcagaagcacctgcagtggcggatttagagcattttatcaacagagttattaaatttcaggtcgaaaatttatatacgcaagagcaatacgatatcattttaagttaaagttgtaacaagatatcgcttaatccttgttacaactgaaattttactttcattcatgaattttaaatactacttacatacagtagccctagacgttctccctattaaacgtcttagcaaacaataagaggtataacccatgaatgtaagtgaaaacttaattagcaacggtcttaaacatgttttagaaagcacgccagtcaatagctgctatatgttgaatgaccaaggtaaagaagtaccaatcacaactgcaatgattcgttcagtatgtcatcagttacttaaccagtgccgcgcaattaaaaaataaggggccattttaaagccccttaatttttcctaactcgctgaatgatgtttcagctgtttctcttcaataatttcttcaaaccgttgaatctcatcttcaagatgcgttaaaaggttttgcattttaggtaaagcatttcgacatgctgttaaacctacttcaagcttatccagatagcttgtcattgtaatattgagcgcttgcccgtccatgacaatagaagcagggtagagtgcatctaatttcgcaccattccaataaagcggctcacgtgggccaggtacattggaaatcactaaattgaatgcctgacgcttaggaagcatccccgacatgatgttaagtccagctggaccataaacaacagcgctatagtttaaaatctcattcgcggtcatgcggctaaagcgttgctttgaattttgcatactacgacgaatgatctcgagccgctctagaggctgatctttatgggttcctaaatttgccaaaatcatggtaatacgattgctcacgtcagagtcatctgtgcgtagggaagcaggaaccatggcaataagaggctttctaggcaggctgttgtgactaattagatattcacgtaatgccccagaacacacagcaagtacgacgtcattgatcgttacaccaagtgctttagaaatttttctaagacggcttaattcaaaagattgggctgcaaagcgacgtgaagcacttacacgttgatttaaaattgaaaccggagcttgaaaggtagagacgtaatcaggatttttacccatttctttaaaaatggtttgcgataattcctgcatgactttaggggtcacctcaagttgtgatttgataccacctaaaatacttttgatcttacttgtacttggttttggtacttttaagcgttttgttcttttactttctacacaccaaagtggaaccacatgtttttcttccggcgtttttgacagcgacttctcaattaagcgcatgcctgcaacaccatcaaccatggcatgatgaatcttaaagtacatcgcgaaacgattgccttcgatcccttcaataatgtcacacgtccaaagtggttttgcacgatcaattaaagagctgtgctgctgggaaatataaaccagtaattcacgaattcgaccaggatgaggcaaggcaatatggcgaaaatggtggtcgatatcgaactcttcatcttcatcccaaaatagaccatttaaacggttattgaagggtggaacaggaatacttttagattggcgtatttcttctactaaatcgtgaacgaaagtttcaggggcattttcaggtatttcaaataaaaacaagccgccaacatgcatcggttgttgtcttttttctagtgatagaaaaataaaatcaatagggtgtaatggacgcataactcgttgtgcctcatgcttttttctaagaagcccttaactgagctcttattagaattatagaaccgtaaatttagtatatagcgtttattacagattaaatatgactttgtgtacgagatataactgtaaaaaaaaccactgattcatcagtggtttttttataccgaactattttttcaagttacctgcatgtaagccacattctttttgtgttgcttcttcccaccaccaacggccttcacgttcatgttgatttggaagtactggacgtgtacatggctcacaaccaattgaaacaaaaccacgctcgtgtagagggttatatggaatttccatcatgcggatataactccacacatcggcgctagaccagttcgcaagcggattatatttaataagttgcttacccggaccagagaagcctgcatcagcttgtaccactggaatttcagtacgtgtaccagggctctgatctttacgctgacctgtaatccaaccatctaaggtcgctagtttcttacgtaaaggttgaacttttcgaatgccacagcattcttgatgtccatctttaaagaaactaaataagcctttttcattcaccatgctttgcacagcttccgcatcagggaaacaaatctcgatattaatattgtagtgcttacgaacagtttcaataaattgataagtttcagggtgtagacggcctgtatcaagactaaaaacacggaaaggtttacctaaacgtgaagccatatcaattaagactacatcttctgctccagagaacgaaattgcgatctcaccttgttggcttaatgcaagttctagaatctcgcgcggacttttagctgcatattcagccgcgagagcatcaacgatatcaatagtcggaataacggtcatgggtgttcctggcaaaaggcttgggcgcattgagttatgaaaaatattctaaaggatagtgaataaattgcttagcactttaatttcgatccttatgaataaaattgatttgatcaataacaacgcaaaactgaaaatcttaatggtatgatacagcaatttttaaccaacgttggaagcattcatggaaatcgtatgcctagatcttgaaggagttttagttcctgaaatttggatcaatttcgcaaaaaaaacagggattaaagaactagaagcaacaactcgtgatattccggattatgatgttttaatgactcagcgtttgaatatcctaaaacaacacggtttaggcttaaaagacatccaagaagttattgccgagatggggccactaccaggtgcaaaagagtttgttgaatgggtgagcaatcatttccagctggtcattttgtcggatactttctatgagtttgctcatcctttaatgaagcaattaggctggccaacaattttctgtcataaattagagacagatgaaaatggtatgattaccgcttataaacttcgccaacctgaccaaaagcgtgagtcggttaaagcactacatggtttgaatttccgtgtgattgcagcaggtgattcatataatgatacaacgatgcttggtgaagccgaccatggtttcttgtttgatgcgcctgcaaatgttattgcggagtttcctcagtttcctgcaatcaatggttatgatgcattaaaagaagcaatccgttctgtttcacagcgcaatattcctgcttaagcaaggacaaatacacaataaaaaaggcgcttatagcgccttttttatttagattggtttttgaaacttagaatttataaccaagttttaaaccgtaagcgatagcattgttatcagagaagtctgcaacatattcatcgctacctgcttgcgcgcctgtttgagctttggcatcacccaaccagaagtattttacgccaccagcgatgaaagtttgtggagtagggctatattgaacacctaaacctacgttccagtaaccttctgttggtcctaatgttgttacaggattacctgcaccagagtcccaacctacagaaacattaccagcccatttatcattaagtttacggcctacaccagcgttcacagaccattggtcatcagaatattcaactaggttgaagccatttggacgcccaacaagaccacctacagcttctgagactttgccaaatttatatggttgaattgagaaatctttccagttcacccagcgtacattggcaaacgcaactgtatccgccatgatacctgtctgaaaatcaaggttaacagactgtggcgttgtgattgtagttttaccagatgaattaattgcttgaagtttagatgctggaacatctaaaccagccagtactgaagtaagaccagggaaatttaatatagataaattttcatcaatatttactttgtgatcaatttcagaacgataagttacagatgctctaagtgcgatttcaggaatctgataagcagcacctgctaaccaaccagcacctgtagtttctttaatatttgcatcataaccattataaagactataagcttgacctcgtaaacttacattacctttaacggtttgtaatacaggacctgcgtagaaattgaagtttttagttggttgataaccaaatacaaaagataagttttgtgtatcaactttaactttagttccaccagtacctaaataattatttgctgcgttaatagcagcttgggttttttgtagtgctgtcagtcctgcacctacagttgtatttcctccggcagcaacttgttgtaatgcgcctaagatctctgtttgagttggttttgtagggtcaccgccagtaaccttcgtcacctctataagagctggtgtaaatgctgacccagatgcttgaactaacttctgaattgagctgcttgctaagtcacctaatgccttttgacttaaaatagtatcactgcctggattcgaaacgaatacgttattacctgaatattctgcatctgctccaaatggttgatagtagagtagaccgaaagaaaattggtcattaatttgtaattttaatgcagcacttgggaagtagtagtcattcgccatatcgccaatatcacgacgtgtggcactagatccagcttctttaccagctacatcaggatctagaacagaaatacctgcttcaaagtaattaccaggttggaagaacgcagacattgactgtccagagcgatctaaagctgctgcaaaaaccccagttgcaggcagcgttgctaaaatcattgcagtgctcagatgttttaatttcatttttaatctttccttgaacttcaagacatttttttaaaagtaacagagttaaaccgtttaaactgtgttgccttcagtgctttgaattacaagtttcaaagcattgataactccatgtaacaaaaatagcataattacactaagagtaaatctgttctatgaactgcagagtactcactttttatacaaaaaatggcaataatgaatgaaatatgaaggaatatttttgttgtttaattaatttaaataattgatatttatattttttatctattattaaagttacttgtttttatgacatttttgtcataaatccaagaaaaatggtcaaagatttttttgtaaaaatatgaattgattgattatgaaatgagtattagtcatcatttttaatggataagtctagtttctctacacatgtatattattgattcggttttatattgttatttattagataaaaattgagagtattttctttactatttggtcaaattttttgaggaattaattgctggatttaagcttgctttatttaagggataaccgaaatagaaaagaattcggttatcgcgccttttagatttaaaacatagcattagaggggatataacttttcatcaaactcttcaagtttaggaaattttaaaggttcaagttggtcaaggtgagtgagatacgtgacatagtcctcaagaatagtttcacgcgcttcttggctaatgtaaggtacatggtaggcaatgaatgggggaagaacttcaaagccagtataagccaaactaccgcgttgaatcggtgatagataatgttcaattggtccgtgaatagaattttccccaaacatatgtgttctaccaccgagtgttaaacagagcattgcttttttacctgccatgccaccatggttgtaaaaccgcttaccaccataaaaaagtccagagacaaatacacgatcaatccagccttttaaaattgctggaacagaagtccaataaagcggaaagttcaagattactagatcggcacggtttactttgtcaatttctgcttgaatatcagtagccaaaagttgttgttttgtggcatttcgctgttctaatgcatagttaaagtaatcaggttgattgagttctaaaaaatcttccttagaggcaacaggattaaactgcattgcatataaatcggaaatttctacttgatggcccaattttttaaaggtttgctgtgctgtagtttttagggaggttgtaaaagacagaggttctggatgagcatgaacaatcaggatattcatagtgtctttactcttaaagataagattggtttttagtggaatgtcggagagttaagtcagtttgtcttaagtgactatgcctgaatttaaaagcatggcatagttcatgaactgacagtttttaccatttaacgccacaattacgctttctaatgggccgctcatgactccagaattacccggaacttatattaatttattagttgagatcgttaagcgcagaggtatctcttgtgagcagtttttagagggtagtggagtaacaccggaacaattaaaaaaaccgtattggtatgttgagtttaatatcttaaataacttacttgagcatgcgattcaactcactcatgagccagcattagcgggttatttggcattggaaatgaaagcttcttgttatggttctgtcggtatggcggccatggtgtctgcaaatcttgaggaggctttaaaaatacttgaacaatttattggttcgcgttgtgatgcctttaaacctgagttaaagcaagagcaagacgatgtttactggtctattcatcaacctttaaaaagttttcaattaagttcagatgcgactatttttttgttgttaggttttgtttacatcgcaaaacatctaacaggggtatcttctttaggtacagtgcaattgaatatgcccgaaccactaggtttttcaaaaataaaagataaattaggcgtaagttgtttatttgagcaaaaacataatatttggattattccaaaagaatatttaatgcagcctgtactcacggctgatcctatgctggcacctttactgaaagcacagtgtaaaaaagatattgataaattgaagttacgaagtgggtggaaagcagaaattagccaagtaataaaaaaattattgatcaatagtcagggggaaatattaaaagttaagcaagttgcccaaatgatgaatatgtcagaacgtagcctacagcggtatttggcaatagagaatacaagtttctcagcattagttgatttaactcgaaagcaatatgcacaagatcttttgcaaaatagttcaatgtcaattgaagctgtggcattaagtttaggctatgccgatacaccccatttcactcgtgcatttaagcgctggatgggtgtaacaccgaagtattatcaaactcagttaaaactaaaaaatttagagatacgtgaataatcaagaagaccacaaatttgaaagtggtcttctaaccctattttaatttgttaactcttgttttgatgaaagtatatgaattacttcaaaatagctcggtggagtgggcacatgcccacgttctcttaatattttgtgcatacgcggtaatttaaaatatggaacagacgccattaaatggtgttccatgtggtaattgacatgaataggggccacaaagcttctcgcaatccaacctgcacgtgtggtacgagtgttagttaaagcagtattgctggtttgcatacctgcatgttctgccattgaacgaattcttaaaaataatggaaatggagtcaaataagccaaaggccataaccaataaaaacgttgttgaccacatgcttttaaaacaccataaagtaataggttggttgcaatagcgcctgtactgttttttgcaatactctttgcatagtcaacgaaatttttatcactgcggtctaaccagatttgatcattggctacagtccatttcatgacatcaaggtccatcaacacacggcctaagctaaactttaatcctgttataccggttaagtcgcgtaagaatttacgagtaagagattgtttactgacaggaaagcctgcaactaaagaaagatctggatcatccggtgtagatgtttttgcgtgatgtcgaacatggtgtacacgatatttttgtaggtcgttccagattgggcgggcacatagccactccccaacgaaatcatttattttcttatttttgaataaacttttatgggatgcatcgtgcattaaaattgcgaggcataactgacggccagctaaaacagctagagcaagcatacatgctaataatttcccccaactcggtaagtaatcccacatcataattaagctggcaaatgttcctccaataacagcccatgtgctagcaacggcccaagcgccatatgcatctgaaggttctgtaagctcttgtatttcttctctgctaaatagatcggtaacactcacctgtgcattcatttttattctcccaaattagagtttggtatccatattttatattacaaatatagtcataaaaatttaaaaagtgaaatatttgtttgtaaaaaaataaatcagatggctataaatttaattcctgttcatatatttttttccaaagtttttggccaattgcatctagttgctgtacatcttgagcaaattgattacgagcagattcatttacaaatggctctggtaataatgggtcattcatgagtaaggcaattgtttcccttcctaaaagaagtgccttgactgctgcatcgtttaaaggggagtgagcataattttcaagccagtgcgtaatatctcgactatacatttcataatttttttcgagttgtttggtatcccataaagaaaaaatttgcttaagtgttgttgagtcgacatgctgaataatacaaatttttgcttctttctctagccctgctaaaacaagctcatcacaggttttttcaaagctataagctaaattgtctgggcggatgtaaataccagtttccaactctttaaaaccaaattgacgaagtgcacgttcccgtttttttagtgctgttcggtctatgcggcctaaggttcctgtaaacacggcaagataatgctgctgccattctttagtttgtttaattccatttttacgattgagaataactttcgcccaatcttttgcagatggagaaagttgatagattccgcgttctacgctctggatcataccttcatttaacaagcgtgttgtcgcaactcgaataccattttcacttaagttaaaaagtttagctgcaaccaaaatttgtttgatactgagctgaggataagcagaagaaagaaagaggtcgataataagatgacgtgcgttaattttggtatttttcattcagtctgaatttttgatatgagttgtatttaattggaataataacatgtttttttaaggactttttaagatgattttctaaactcatctattgtaaaagacttatctataacaaaagaaaatttggccatttttaaccaagttttatctttttacgatagttaacctaagtttgtcattatgatgtgatacattatcgcactttaaataaactgcctttcactagaggcaataaccacaaatgctagaaatgatctgatattgaacacatgttgagctaaataaaaggctaactgtggcaataaaataaattttagatcgttctagtgattaactaactttctttgagcaagttatggaaaattttgaagttataaaagcactgtttctaggctttgttgaaggcttaactgaatttttacctatttcgagtactggtcatttaattttatttggtcatattatcgatttccattcagatggtggtcgtgtctttgaagtagtgatccagttaggtgctattctggcagtgtgttggttatatcgtcagaaaatcattaacttaatcaaaggtttttttagtggtgatgtcgagtcacgccattttgccattagtgtcttaattgcttttttcccggcagtgattattggcgttttagctgtagattttattaaaagtgttttatttagcccaattgtagttgcgattgctctgattgtcggcgcgcttattattttctgggttgaatctaaacaatttgaacataaaacggatgatgcgaccaagatcacgtttaaacaggcgcttttagttggtctggctcaatgtgttgcgatgattcctggaacctctcgttctggtgcgacaattgtaggcgggatgtttgcaggcttgtctcgtaaagctgcaacagagttttcgtttttccttgcaatgccgaccatgctaggtgcagcaacatttgacctaattaaaaatgctgatgtgttgacttcagacaatatggttaatattggagtgggttttgttgcggcatttattgctgctttattggttgtaaaagcactcgtactcttcgttgagcgtcatacattacgtgtatttgcatggtatcgaattgtattaggtgtaattatcctaattgctgctatgttctttaacttatctgcttaatagtcagattaaggataaaaacctagagaaatctaggtttttttatgcctaaaaatagctttaacttgcttatttatacaaagtactaccaagaaatactttttccttttagtttgattgatatagtaaatcttaaatagcccgtaaaaaataaagcaatgcaacagaatgacttgacgaaaagtttggtagaggcttttttgtatttggctcctcaagaggggttatatcccactcatatttcaaatatcaccctgatgagggtagatcattccacacagccggttgctgtattgcaagagccttccattgttttagtcattcagggtgtaaaacgagcttatatcggaaaagatatttttaagtttcaacaaggccagtgtttatttatctcaattgctattccttttgattgcgatacgttggttgagcgtgaaccaatgcttgcaattgcgattaaatttgaacctcaaatgatggccgagctggcggctaaaatggataaagagcagcgaccacttatagaagattttgataacaaagagataaaactgagctgtggtttaaatattattgaaatgaactcggttatatctgatgttgctttacgcttgttgaacttacttcgttccaagcaagatactgcaatcttaggagagcaggtgaaacgagaacttatttatcgggttttacaagccggtggtggtgattttatccagaacctttcggctattatgagccgaagtggagtgatttatacgatttgtgaaattattcaaagagattattatcgtaacttaacggttcaggagttggctaaacaagcaggaatgagcgtttcgctttttcatcaagcttttaagaaagttaccaactattctccattacagtacatcaaaattactcggttacataaggcccgtgatctaatcctaaataaccaaatgggcgttgcagaagctgcctatgaagtaggatatgtgagtgcctcacagtttagtcgagagtttaagcggctgtttggagttccacctaaattatcaacaaactaaagtaaatcaacacgtcttaaatataaaccaaacatggagcatatcaatgaatcttccgacaaccatgaaaattgttgaaattacggttcctggcggacctgaggttttaaaacttcaagattcaaatgttccggtacctcaagctgatgaagttttaattgaggttaaagccgttggaattaaccgccctgatgtcttacagcgtatggggttatatccaatgcctaaaggggttactcaaatccccggacttgaagtcgctggagtagtggttgctgtgggtgagcaagtgcaacagtttaaagtcggggacaaggtttgtgctttaaccaatggtggcgggtatgcagaatactgtgcggtaactgcaactcaagtattaccaatacctgagaatttatcatttactcaagctgctgcgattccagaaacattctttacggtttgggcaaatctttttgatattggccgtttaaagaaagatgaaactaccctgattcatggcggtgcaagtgggatcggaaccactgctttagcgatttgccatgctttaggtattaaaacttttgctacggttggtagtgaagataaagttgaagcactctctgacttaaccacagcaattaattataaaacccaagattttgagcaggaaattttgaaccatactcaagaacaaggtgttgatgttattttggatattgtgggtggttcttattttcagaaaaacttaaatctattaaaacgtgatggccgacttgtcattattggctttatgggaggtcgaattgcaaaagaatttgatttacaaaaactgattttaaaacgtgccacaattacaggctcaacgatgcgagcgcgtaatagccaagaaaaagcacagattgctcaatctttacatgaacatgtgtggccattattggagcaaggcaagtgtttaccacaaatctataaaacctatgctttttcagatgtacaaagtgctcatgcatgtatggagcagggcgaccatattggaaagatcgttttagagatgaatgcttaatcttatctgtgacagtttaggtgaatgacatgtttgcctaaactgaaattttataattattaattgtgcctatttctatataaaaattgccaaattctattggcttgttgcacctgtttcttgatctgaatatacatttactaagaaataataactgtcttaaagctgttatttcgctcttcaattctaaaggatggtaaccatgaataccccagcatcaaatgataaaaatccaactccagatttagctgaagataatgcgttcttcccatcaccatattcactgagtcaatatacttctcctaaaacagattatgatggcacaacctatccaacgccgtatgcgggcaataaaaaggttttaatgattgcaactgatgaacgttatatccagatgcaaaacggtaagttcttttctaccggaaaccatccagtagaaatgcttttgccaatgttccatttagataatgccggatttgaaattgatgttgcgacactttcagggaaccctgccaagcttgaaatgtgggcaatgccaaagcaagaacaagtagtattagatactttccagaaatatgcagataaattaaaaaatccgttaaaacttgccgatattttagaaaatgtagtcggtgaaaactctccatatgcggctgtatttattccgggtgggcatggggtattagcgaagattccgcatagccttgaagtgaagaaagttcttaaatgggcagttgaacaagacaaatttattattacgttatgtcatggtccagcttcgttactggctgccgcagtagatgaacagcctgagaattatatttttaaagattatcaaatttgtgtattccctgactcgttagataagggagcgaatattgatattggttacatgcctggagcattaccgtggttagtcggtgaaaaccttgaaaaactcggtgtgaagattttgaacactggcattactggtcaatgtcatcgagaccgtaaattgttaacgggcgatagtccgcttgcttctaataatttaggcaaacttgcagctgaaacattgctggctgaagtgaaggattaattaactaaaagtgtgcgccctgcgggactcgaacccacgtcggtcgcttaggaggcaactgctctatccagttaagctaagggcgcataattttctgattataaacaaaaaagccattgccgaggcaatgactttttatagttttaagtacaagctgttagattactgttctttggcattgagtactttaaacaaaataaacatgagaacgatccaaataggaatcatcatcactgattctttaaagccttgactccacataatgtagagtactacagcaataaaacctaaaaccaaatagttactaaacggtgcccaaagtgcaggaaagtgagttttttgaccgagttttttcattgctgatttaaacttaaggtgagtcatactgatcatcgcccagttcaataccagtgctccaacaacaatgtacattaagtggcttaaagcatcttctggtacaaagtaatttaaaagaacacagccaaaaatgagtaatgccgatagcaaaactgctggtacaggtacaccttgtttatttactttcttgaaaatttttggtgcattgccttgttgagctaaaccgtaaagcatacggctatttgcaaacatcccactgttataaacagagagagcggcggttaaaataataaagttcagtaagtgtgcagcccaaccaatacccatttgactaaaaatcataacaaatggacttttgtcgagaccgccaagatctaattggttccacggcactaatgaaagtaagatcgctagtgaaccgatatagaaaatcaagatacggaaaacaacttggttaattgcttttggaatagtttttttcggatcttttgcttctgccgcggccataccaatcagttcaataccaccaaaggcgaacatcaagaaagccaacatatagaagaggccactaaagccatttggaaaaaatccaccatgagaccaaaggttactaaacgaaatgcttgaacctacatctgctgtaaatagcaaataaaggccaaaaacaatcatagagataaccgcagcaactttaataatagcgagccagaattcggactcaccataaaatttgacgtttgttaggttaattgccgtaatcacgacaaagaaaaataagacagaagtccatgctggaatatgaggccaccagtaattaatatatttggctaccgcggtgagttcactcatcgcaaccagaacatagagcatccaataattccatccagctaaaaatccgggaaatttcccccagtatttatacgcaaaatggctgaacgatcctgcaacaggttcttcaacaatcatttctcccaggtggcgcataattaaaaaagcaattaagccaccaatggcatatcctaaaataatggatggtcccgcagattgaatcacttgcgccgagcctaaaaataatccggtaccaattgctccacccatagcaattaattggatatgtcgattttttagtcctcgttgaagtgtagaagattcgttggtcaaaggtcttcactcacaatgaataagtaaattattctaatagatggatttattttagcctagactacaattgaacaagggatgactgtaaagtaactataaaaaatatttaaaatcataaacttgcttttaatcgtgttaaattggttgaaaaatcttccaaaaatatattttttgatagactttttttcttatgattttgctttattcggtcattgcaggcatgaattgaaatttccaaaataaacccgcgtcaatacgattgatgtataaaagtacagtgctatctcttgatcataaaacgatttaagatgaagcgaatgactaaacaagtctgcttgttttgagatataaaaacacaatagtaaggataacagttgatatgagcttcgtaccgcaaattaaaattccagcaacttacatgcgtggtggaaccagtaaaggtgtattctttaaacttgatgatttgccggaaaaagctcaagttgcaggtcaagcaagagatcaactcttgctacgtgtcattggtagcccagacccttatggaaaacaaattgatggaatgggtggagcgacttcgagtaccagtaaaaccgttattctcgccaaaagtacacagccagatcatgatgtcgactatttgtttgggcaggtttcaatagatcaagcttttgtagactggagtggtaactgcggtaatttaacagcagcggttggttcatttgcaatttcaaatggtttggttgatgccgatcgtattcctgaaaatggcctttgtactgttcgaatctggcaaaaaaatattcaaaaaactattattgcgcatgtacctatcatcaatggccaagttcaagaaaccggagactttgaactagatggggtaactttccctgctgctgaagttcaaattgagtttttagaccctgccgatgatggtgaagagggcggtgatatgttcccgacagggaatgttgttgaccaattagatgttccagagattggtagttttcaagccacatttattaatgccggtattccaaccattttcttaaatgcagaagatttaggctacgaaggtactgaattacaagatcatattaatggtgatgcagcagcattagcacgttttgaaaaaattcgtgcctatggtgcagttcagatgggcttaattaaagatatttcagaagcagccgcacgtcagcacacaccaaaaattgcttttgtctctaaaccaaaaaattacacagcttcaagcggtaaaaacgtttcagagaacgatgccgacttactcgttcgagctttgtcgatgggcaaacttcaccatgccatgatgggaacagcagcggtagcaattggtacagcggctgcgattccaggcactttagtaaatttagcagctggtggtggagaacgtgaagcagtacgttttggacatccatctggaacattacgtgttggtgcccaagctgaacttacaaatggccaatgggtggtgaaaaaagccattatgagtcgtagtgcgcgtgtgttaatggaaggttgggtacgcgttccgggtgacagtttctaaaagtcatttaaatgaaaagcctctctaccctagagaggctttttacttctgacatccataactcatcacgcactttttacagtgaatcgtgtatgatgtagcacatgaatgtttcatcacattcaataaaatttctctactgattttacgaggcgactgtgtcatcactctctcaagttaatgcggatgttttaaaacaagctcaacaacgtattcaacaagatttattgacgacactggctgcattctcaattcccgaacctttaaaaagcgctgtacaccatgcagttatgctcggtggaaaacgtgtgcgtccggctttgtgttacgctacagcttctttacaagataatccaaattttgcggctgctcgccgtgctgcggttgctgttgaactcatccattgttattccttagcacatgatgacctgccttgtatggacaatgatttgcttcgccgtggtcagccaacgtgtcatgttgcatttggtgaagataccgcgttacttgcgggtgacattttacaatcaatggcttttgaagttttagggagccgtttgtttgatgagcaagggcagggaacggatgctgcaattgtcttaaagcaaattcaaattttagctacagctagttctaaaatggtttgtggacaggttttagacttacaagcggaagctaaacaaatttctcaagacgaactagagaatattcaccgtaataaaacgggtgcgcttattcaggctgctattatgatgggggcagtgacaattttctcgggtacagatcaggcaattccaaaactacgtcaatatggtcaagcaattggactggcttttcaggtccaagatgatattttggatattacgtcgagcactgaaactttaggcaaaaccgctggtaaagatgaacaagtacaaaaatcgacttatcctgctctaatgggactagagcaagcacagatttatgccaaagaattgcatgatcaagctttcgatgccttagcgcatttcggtgaaaatgcaaaagaattagttgagatttcacaattcctgttagctcgtactaattaataaaaacataaatcaatcttcctacttctattcagacttaatgaatacaggagaaaagaatgaatggtgaacagcttcatcaactcgcaatagaggcggcgcgtaatctcccttttagtgagcaaactcatccatttggtccagagtatgaagtttttaaaattttagaaaaaatgtttatgctgacagtggaagtgtctggcataaaaatgattaatgtcaaatgtgacccttataaaagtcaggaatatcaggaactctatccatttattattcccggctatcacatgaataaaaaacactggatttcgattaaaccgcataaaaatttaacaagcgattttctccgagatttaattggcgactcttatgacttggtcgtaaaaaagcttcctttgaaagatcagaaaagattaaacaaccaataatataaaagaaaaaacggcgacatgattgtcaccgttttatttcaagtaattatttgaagcaattaaattaattatgctttcccataatgccacgaattgtatttaaaacatcggcaggtaacacaacagttttggcattgcttgatttcgccatatcttgcattgctttgacgtattgttcacctaacaggtaagcaacaggaatttctttatcacctacggcacttgttaccatttcaatcgctttttgagaagcttctgctaaaacaacctgcgcttcggcatcacggcgagatgcttctaaacgaccatctgcttctaaaattgcagcttgtttctcaccatcagctttggtaactgtagcacgacgttgacgttcagcagcggcttgagcttccatggccgcttgcatggttgaagatggctgaatatcttgaatttctactgtttttaaagtgataccccaatctgaaatatcatcagaaatcgcagcttttagtttagctttaatgtgatctcgtgaagatagagcatcatctagatccatttcaccgacaattgaacgtagtgaagtctgtacaaggttttgaatggcccatgtatagttttcaataccgtacactgctttttcaggtgtagtcagattgatatacgccacggcattcatgagtaatacagcattgtcacgggtaatgacttcttgtgatggaatatcaagcacaatatctttagtggtgactttataggctacatcatcaatataaggaataacgaagttaagccccggattaagcgtagaatgatattttcctaaacgctgaacaatccatttataaccttgaggaacaatgcgtacccctttaaaaatggtaacagcaacaaaagccaaaaaggctaaaacaataatagtaccaactggcatgaaaataacctctctttatctttaatgtttatgaagtgctgtggggctgaacaattaagtcattacccgaaatatcaatgactcgaacccgatcaccgaccttaacaggggtggtgcttcggcagttccattcatcggcccctaaaataggcatagggaaacgaacaataatttggtcatgagcaagtccggtctgaatcaccataccaatttgcccaatagtcgcttctcgaggtaaacctgctttagttttatcaatagataaaggcttaataaatttaaaccagagaagggtacatagcaccgataacacaatccacagcactatttgagtagtaaggctgatatctggaaataaccaatagagaaagcaaaccattatggctgcaataccaaaccagagagcggcaaaggcagggagaatcagctcagaaagaataagtaagatacccaatacaaaccagtgccaaggttctacaacaaactccatagatctgctcttttatatgtctttatgatgggtaaaagtgatttcatatcacttttaccactgtagcagatgatggagagtgtggatagaaaaaaaccacctcaattaaaatttaggacgtggcgcaggcttaaatgcggctggagattttttgaaatttgcaattgcagtttcaatttggcgaatttgaccttgagcagctttttcgccttctaaaatagcttcattacttgattttaaatcgagtgtacctaagtgcccaactttaggctgaatcaccacgttagcttgctttaactcttcattaatactttgttgacccataatattaatagtttgatcaagcaatccccacatattcgcaggtcggtttcctgccggacgtgcagaaatgtcaactgcaatcacaatatcagcacccatatcacgtgctgttttgaccggaattgggctaaccagtccgccatctacatatttctgcttaccaatggttgctggtacaaatacattgggaatactgcatgatgcacgaacagcttgtcctgcattacctttaataaagtctgctttttgtccattatcaagacgggttgctaccgctgcaaaacgaattgggaatttctcaataggcttgttacctacgttacggttaacatagtcctgtaacttttgcccaagaataataccttggcgattcagggttaaatcgcgaatatcagactcttgcaatttaagcgcaagattttggagttgataaggcgtttgtccactggcatagatactgcctacaaagctaccggcacttgtacccgtaacaattttcggtttaataccatgtgattctaaaaccttgataacaccaatatgtgaaaatccttttgctccaccgccacccaatgcaagtgcaatcactggttcgcgcgctttaactgaagtggtcggtgttggtgttttgctgaacttatcacagccgaatagggctaaagagataaatccgatactggcaaattgagcaattttcatctttgaaaaacaatctatggcaagataaattaagatggcccatcagaccagattcgttcaatttttgctaggtttttttcacaagattttgtaaaggctctgcaagccaattacgatttttcggtgatatttttccttcataacgttcaaaaatcttggcgagatcttcatcataatttccgcttggagttaaatagcctaagcagtgaatagtcttacggtcataatcaaaagaaaacatcacaataggaatattggcttttgcagcaatatggtaaaaaccactcttcattttttttgctttcttacgtgtgccttctggcgccattccaatccagatcttgtcatactgttgaatagtcgcaacgacttgttcagtcagaccattggccgagtcacgttttacaggaataacgcccgcccaatctaaaacccgtttaaaaggtggcttaaataaactgtctttacctagcaccgtaatttgaataccgagtccaaaaatggcaagaaaaccataccagccatcaatattggaggtgtggggagaaataatggctacagctttaggaaagttgggaacttcaccttctatagtccagccttgtgccaaaaagagttttttaaataatgctcgacttaaagcattaccacgttggggaacctgagacggtagattagggaaatgttgttccatatttttaagttttaaatcatcctttgttttatcttaatcttttgaaatctgcgcttcattggcaaaatgtaagaccacgcatggtatttcatgttattaccgcacaaataaataaaagtaggtatatatgttccgacagcaaaatctttatcttttgctcttttccttatattgggcacaaggtttgcctgtaggttttatgacgcatgccttacctgtcatattaagagctcaaggtgtatctcttgcccatattggtggttttgggctgctcatgttgccttggtcaatcaaaatattttgggcgccgtgggtagatcgacatgccatctcgcatttaggtcactatcgtagctggattttacccgctcagtttttgacggtgggtgtactttgtattttatcttttttccctatacaagttttagatcagcctctttatctctttatattttttattacgctgttatttatgaacttaacaggcgcaactcaagatatcgcgaccgatgctttagcggtcaatttattgcaacacgatcagcaacattggggaaatacttttcaagttgtaggttcacgacttggttttattgtaggcgggggagccgtgttatggtgcctagactggttatcatggcagccgacttttctattattagccgctttagtctttattaataccttacctattttactatttaaagagccatctcatacttctcattcacctcatcaatatagccaaccacgtctagttacaaagattaaagcttacttggggtacttctctcaaaataaggaacttcgttcttggttaatcgtccttataacttttaaggttgcagatggtttagccgggccattacttaaacctttaatggtagatatgggtttaagttttactcagattggtatttacatcaccatgcttggggctgttgctgctttattgggggcacttattgctggctggatgttaaaacatatttctaggtccacagcattaatgactttttcgatattaaaaattatgagtttagggagctatgcgtatttggcttatgcttatgaacaaaagataaaaataaatgcatggcttatctatgccgtaaatgccctggaagatgcttttgctgccatgctactggttgtgatgttaactttggttatgcattatagtcgaaaaaactatgcgggtaccgattttacttttcaggtttcagtcatggcgacagtcagtggtggtctttatagctttagtggagtcattgcagatgcgcttggttatttccattatttgatagctattgtcagtattgcggtactctttttaattcctatttacttatggaaagctgccaaaactgtataaaaaataacattaagtagatgaaataaagagacttaaatataaataagctgcactaaaaaatcatacttatatttttagccaatcttttaaaaatgtatatttttggctatttaaatggcttattaattgtgccatcttgtttggaaagcaaaaggaagctgcaaggagagaagtggatgcaaataacaagaaaaatcatgtgaatcaaataagactggcaaaaaaatattcatttagattggatattagcctaaagtctaaaaaagaataatgaaataatgatttaatcattctataagataagagagttgtgtaggattcgttacaacatgaagttaaggtaaaggttctgtaaaccaaaaagtaaatgctgattcttttggaccggaatttttaatcttacccagcgttaaaattggttttgattgcggtaataaaattaatgcaatcaaatttggaggatggttgattctttagtgcttaatggtcacacgaatcaacttggcatggacaggcagcataaaatatatttttaggagtctttgatggatctattccttaatcgtaaatcgtttgttgttaaaagtttagctattacagtaacagctttaatgatgagtggggcaaatgcggcaacttctgataaagaggaaattcgaaagcttcgtcaagaagttgaagcattaaaagcattagttcaagaacaacgtcaagtacagcaacaacagcaacaagtacagcagcaacagcaagtacagttagctgaagtaaaagcacaacctcaacctgtggcagcaccagtgtctccattagcaggatttaaatctaaagctggcgctgatgtgaacctttatggttttgttcgtggcgatgctaactatattattgaaggtgcagataacgactttggtgatgtaagtaagtcagacggtaaaacacatgataaattacgtgcgactgctaaaacaacacgcctcggtttagattttaatacacctgttggagacgacaaagttggtggtaaaatcgaagtcgattttgctggttcaaccacagattcaaatggctcattgcgtattcgccatgcttatttaacctataacaactggttgtttggtcaaacaacttcaaacttcttggctaaccatgcaccagaaatgatcgacttctcgacaaacattggtggtggtactaaacgtgtacctcaagtacgctataactacaaactaggcccaactacacaattatttgtttctgctgaaaaaggtgatagtactacttcggtaacaggtgatagtattaagtatagcctaccagcattaactgctaaaatcactcaaggctatgcagaaggcagaggttctgcttcagctcgtgttctggtagaaaattataaatcacaacttgctgatgatgataaaactggttggggcgttgcagttggtactgactttaaagtgtctgatcctttaaaactctttgctgacgcatcatatgttgtgggtgataatagttacttgtatggtagtaactctccatacgcagtagatgggaattctattgagcaaaatgaatttgtagcagtacaagtgggtggaacttataagattttacctaacttacgttctactttagcgtatggtgctcagttctctgatgatggcactgattatgcgagattaaatgcctctgcaaatgaaaaagttcaacaagcatggatcaactttatctatacgccagttaaaccaattgatttaggcgttgagtatgtaaacggtaagcgtgatacctttgatggtaagtcttacaaagataaccgtgttggtttaatggctaaatatagtttctaataacgatttttttagctaaaaatagaaaagacgaggttaaacttaacctcgtctttttttatttgttaaatttaaaaaataataatgaaataaagtctctaaattagatcattttttatttaagtcatttttaagtttcaatttctacattaaagcatcataaaaagattgtagtcactcacgatgctgaattttttttcaacattaagaaataaacagatttccctgtttatgtttaatctcattatagccatttggctaggtgcaattttaaatattggtttttatcatcaagtccatactttaactccatattttggagtaaaggctattttgtttttagctgctactctcataattcttgttgctacctattatgcggttttacaaatcttaaattggaaatggactgccaaaatctttgcaattttattgatatttattggtggttttagctcttattttgtaaacacattaggtgtcattatttcacccgaccaaattcaaaatatggtgcagaccgatgtttcggaagttaccgatctaatctctttacgctttgttttatggacaattttttttgttattttacccatttttttaattactcaagttaaatttaaacaagaaaaagtatcacggttgttattgaagaaagtattctcactggtagcttcattggccgtggtcggtgttttactttttacctactatgtcgattttgctgcaatatttcgtgagcatcgtgatttaaaagggatgatttcaccgcaaaatagtatttcatcgcttatgtcttactaccataagaaggctccgaagaaaaatctgcctcttgtgatatatggacaagatgctcatcaagttcagcgcgtacaaaagaatctccctaagttaatgatacttgttgtgggtgaaacggcacgtgccgaaagtttctctctaaatgggtatgcaaaaaatacgaatccggagctttctaaacaagatattttcaacttctctcaagtgagctcatgcggtacggcaacagcggtttctgtgccatgtatgttctcgggtatgccacgtgtagattatgatgagcaattagccagtcaccgcgaaggtttactagatattgcaaaacgtgcgggttaccaagtaacttggattgataataactcgggttgtaaaggtgcatgtgatcgcgttgagcaataccagattccagaaaacttaaagaaaaaatggtgtaaagatggcgaatgttatgatgacattctcattgacagcttaaagcagtatttgtctactattgccaaagatgatgatcgtccacgtttgattgttttgcatcaggtgggtagtcatggacctgcatattacaagcgtgcgcctgaagcatatcaaccctttaaaccgacttgtgatacgaatgcgatacagggctgttcgcaaaccgaattgctaaatagttatgataatacaatcgtatatacagaccatgtattaagccaaatgattaatactctaaaagaaatatcaaaatatcagacaggtttatggtatttatctgatcatggcgaatcaaccggagaacatggtttatatttacatggttcaccttatgcaatcgcaccgagccaacaaacacatgtaccaatgattatgtggttctctgaaagttggaaacaacataatcttgctcaagtgaattgtttaagccaacaaactaaacaaaagttaagtcaggataatttattcccaagtttgttaagtttgctggatgtaacaactcaggtcatcaaccctcaactggacatgttgcactcttgtgcccatgtaaactaaagcgagcctagaacatgacaaaaatcttgatgattgaagatgattttatgattgcagaatcaacgatcacgttgctgcaatatcatcaatttgaggtggaatgggtcaataacggtttagatggtttggctcagttggcgaagactaaatttgatcttattcttttggatttaggattgcctatgatggatggtatgcaagttttaaagcagatccgtcaaagagcagcaacaccagtattaattatttctgctcgagatcaattacaaaaccgtgtcgatggtttaaatttgggtgcagatgattatttaattaaaccttatgagtttgatgagttgcttgcccgtattcatgcattactacgccgtagtggagtagaagctcaacttgcgagtcaagatcaactattagaaagtggtgatctggttttaaatgttgaacagcatattgcgacgtttaaaggccaacgcattgatttatcaaatcgtgaatgggcaatcttaattccacttatgactcacccaaataaaatcttttctaaagccaacttagaagataagttatatgattttgatagtgatgtgaccagtaatactattgaagtatatgttcaccatttaagagcgaagctgggtaaagattttattcgaaccatccgaggactgggctaccgtttggggcaatcataatttaaaatttcgggacttcataaaagtgcattattcattaaaaaaacgactgatttggggcacctcaattttcagtgtcatcttaggttgtattttaatttttagtgcttataaggttgcacttcaagaagtcgatgaaattctagatactcaaatgaagtatttagcggaaagaacagctgagcaccctttaaaaactgtaagcagtaagtttgattttcataaaacttaccacgaagaagatctgtttatcgatatctgggcttataaggatcaggcccatttgtctcatcatttacatttgctggttccacctgttgagcaagcgggattttattctcataaaaccgctcaaggtatagtcagaacttatgttttacctttgaaggattatcagattcaggtcagtcagcaagagagggttcgtgaagctttcgcttgggagcttgcgggcagtatgtttattccgtatttaattattttaccttttgcaatatttgccttagcagccattattcgtcgtggtttaaaaccaatagatgattttaaaaatgagttaaaagaacgcgattccgaagaactcacaccaattgaagtacatgattatcctcaagagcttttacctactattgacgaaatgaaccgtctttttgagcgcatttctaaagcgcaaaatgaacagaagcaatttattgccgatgctgctcatgaattacgaacacctgtgactgcattgaacttacaaaccaagattttgctaagccagtttcctgagcatgaatcattgcaaaacttaagcaagggtttggcgcgtattcagcatttggtgactcagcttttagcattggcaaagcaagatgtaactttaagtatggtcgagcctactggttattttcaactcaatgatgtggcattaaattgtgtggagcagttggtcaacttggctatgcaaaaagaaatcgatttaggttttgttagaaatgaacccatcgaaatgcatagtattgaacctactgtacattcgattatttttaatttaattgataatgcaattaagtacaccccgcatcagggtgttattaatatttcagtttataccgatccagatcactacgcatgtattcaaattgaagatagcggtgcaggaatagaccctgaaaattacgataaagtccttaagcgtttttatcgcgtgcatcaccatcttgaggtgggaagtggtctaggtttatctattgtagatcgtgcaactcaaaggcttggtgggactttaactctcgataagagcttagagcttggcggtctttctgtattagtgaaattacctaaagttttacatttacatgaaacaagagtgtgattacgtaagttcttgtttcacttgtttttcaaactcaaaacgatgaatacaaatcgcataaaataaaatatttattgcccaaacgacccagcctgtccataagttatggcttagaaaatgtgctcctcgcatcatttgcgcccaacccatcatgaaacctaataaaataccggagaataaataaaagtaagcacgtttaggttgttcaagacgataaacaaaataacctgtcattaaaataaaacctgcacttgcatgaccgcctggaaaacaatggccatgtttagcgctaaagtcccaaatatagcttcctaaagtattagggtgaaccatattccaagggcaggcgtgagcagattgtgactttattaggccaactatactgctaccgagcatactgacaaaaaacatatagccatattgccagcgataaggttttaattttttaatttaaatgacgcaagccataaaccaaaaaagataacataaacggcggtgatgatttgttttacaatttcatgattaagtctttcaagataccaattgtcccgattgaaaaaatgacctgttgaatcaatccaaggttggatgaggtacatatcaattttcccaccgactggaaatacaaatagaagaataaaaaaactgaaaaaaagaaagagaatattaatttggaaaaaaagtttttgattagtcattctgatgcaatatcaatcgacaataggtgcgactaattacataaaattaatcttaaattgctcttaaactatactggtgaaagaagttcaattttccttaaaaaataaaaaagcgacgaatagtatcgtcgccttaagcactttagaaagtattaaaacataccttcttcagagtttgctgagatcttatgaatagataagtctgcaccacggaactcatcttcttgagataggcgaatgccaatggtcgctttaaggatgccataaacaatgaaaccgccagccagtgcaatggcaatcgcgagtgctgtaccgatgagctgagagatgaatgatacgccgcctaaaccacctagccatttttgaccaaaaatacctacggcaataccaccaaatgcaccgcatacaccatgtagcggccagacaccaagaacgtcatcaactttgagtttgttttgggtataggtgaatagatacacgaacatagcacctgctgcaccaccaattacaagtgcactgactggatgcacaatgtcagaacctgcgcaaatagcgactaaacccgcaagtggaccgttgtgtaagaaaccagggtcatttttcccaatcgcatttgctgtaatcgttccgcctaccattgccataagggagttaatcgcaacgagaccagagattgcatcaacacgctgagcactcatcacattaaagccaaaccagcctacgatcaaaatccatgaaccaagcgccaaaaatggaatagaagaaggtgggtgagcacttacacgaccatctttcttataacggccagaacgtgcgcccaataaaatgacagcagcaagtgctatccaaccgcccatggcatgaactacgactgaacccgcaaagtcatgaaaagctgcgccaaaagttgtttctaaccacttttgcagaccgtagttgccattccagaccattccctcgaagaacggataaaccagtgcaaccaatgcgagtgtggcaatcgcttgtgaacgcatttttgcgcgttctgcaataccgccagaaatgatggcaggaatggccgcagcaaaagtgagtaaaaagaagcaacgcataaggttatagccatgatcattggataaaaccgtaccatcatggaagaagtgctggccataagagatgtagtaaccaacaaagaaatatgcgattgcggagagggcaaagtcagtcagaattttactaagcgcgttcacctgatttttgtggcgaactgtaccaagttccaagaatgcaaaacctgcgtgcatggcaagaaccaaaactgcaccaagtaataagaaaaacagatctacattttgcatagcatgctcgaaaaaagtgctaaattccattttggaacaaatctgggtctgtaaattgcaccaaaatagatttaaggaatctaaaaacctaagtttgtcgaaacaaactcaattgcataaaagtgaatatgcaataagcgcaccaatttggattgaaatagaggattttggcgataaatggtgcgttgatttattcaagatagggcaataagggcgctttttacgttacaagtcatctaatatgttgataaattgatctgaaagagatcattattaaatttttaaaaattatctatatttaattaatgatcagaccaaacctcttgagcaacttcaataaatgcttttacggctggactgatgtgttttttgttttttactgcaagaccaatagaacgtttaaggtttggtttaaaagggcgtttaactacgtttggataaagcgagagtagctctttggtgatcaccatatcagagacaatcgaaatccctaactggttgtgaaccatactgacaatactcaaaatttgtgaaacataaaatttgatgtctggtttgacattaaaattttttaaaattaattcgacctgatgtcgactacccgccattgtcataatgaaaggacaattttctaactgtgctggatcaatatagagttgttgggcgagcgggtaaccactcggaattaaggcaacaaaacgatcttcaattaagggaaatgtatcaaaacgctcatctggcataatcaaaaaaccaacttcgatgcgtcgctctaataaccactgagcaacttctttatcttcaccttcatcaatataaatttcgattttggggtagcattgccgaaaggcttctaaaatttcaggcaatagataaatagaggatgaagccccaaaagatccaatacgtagtgtgccttcgtttaaaccatggattgcagccacttctttttctaaggtatcggaaatactcaatagctcttttacatgggttaataactgctgacctgtcgtcgtcagctcaatatcgctttgagttcttgaaatcaggttaatgccccattgttgttctaatgatttaagcgcatgggaaactgccgactgtgaaattcccagcttttctgctgtagcagtaaagctttttagttcagcaatgagtgcgaaaatttcaagctgggtaaatgtcatgttgtacttattatgagtaaaaactcattttatcatgagttttcattatctttaatatatgagtaagccaagttagttcccaaactagcaagcctcaacaaaactcgagtaaagaaatgaatagtattgttttatctctttttcctttagttgcattaattgcatcgggatacttatttaaaaaatatcgtttttttagcgatgagttttgggctggggcagagaagctgaattattatattttatttccagctttgctttttagtacgctatcgaccgcaaaaattgacttacaaagcttgagtacagccatcattgcgatgttggttgtggttttagcagtgaccgcttttttatacatacttcgaatgttttggcacataccacccgcacgttttggtgtgcatgtacaaagtatggttcgctttaatacctatattggtttggctttagtcacttcgctttttaaaagtgaaggaatggcaattctggcaattttattggcgctttgcattccgcttgtgaatgttatttcggtgcttgctctaacctctaaagaacatatggcaattaaacctgttttgattgcactccttaaaaacccgttgattgcatcatgtgtgattggagccgtagtcaatgcgcttcatattcctatttgggaaggctttactcagtttattaagcttttttcagtgtcgagtttgccactagggttgttatgtgttggcgcagctttacagtttatgcaaattaaaaaagacattgtggtattggcagcagacacgtttgcacgacttttagcagttcctgctttggcttatatggtctgcatgtggtttgatttaccaagtttgcaaacgcaaattttagttattttctttgcgctaccgactgcttctgcttcatacattttaaccaaagttttgggtggagatagtcagcttatggcagccgtgattagctttcaaactttatgcaccgccgtgactttaccactggtgatttggtggatttcttaagatataaattttaggctttttaacacttaaagaatgctggctaccttcctcatataattattgctacacttttttctttttcgggtggatgagtatgtcctttgatctcaaagtgagcttgcagcaaaggtctgaaccatctgcacagcagaaaaaactgaatcgcctgattgataaaatagaacagcaaaaagttagtctgagcacatggcaaaatgcacaagctgagattcaacagtacatacgacaaaaactgatgcctgtatataatgatttacatacagtgctatttcagcagttagagcaactttggaatatattacatagccatgagttttccaaagcagacatacaacaactggatgaaaaaattgcccagcttgcacaaatgttgaagcgctcaaaaatgttatctgctgaacaggtggatttagtgaagcagatcgataacttttatcagcaacatgcagcggaatcggcaaaaaagaatagaaaagctcagtcaataaaatctgaatatgaagaaagcgttgatcaaggtttagagttagaagaagactttgaacggtatgcggctgagcaacaacaagcgcggaaacaagctaaacagcaaagacagcaacaaaaacgtgaacaagctgagcaaatggcagcccagtcactcaaaacagtttatttaaaaattgccgcgatgattcacccagaccgtgagcaagatgaaactaaaaaagaagaaaaaactgagttgttccaacaagcaagtcaggcctatgaaaaacaggacttgttttacttactcaaactccagttacagcttgaacagaataaagggctaggcgctaaagagttatctgctgagcagttgcggttttataaactggctttggatgcacaaagtcagcagcttgaaagtcaaattgctgagattttagattcttttcagttagccaagaatgtgaaagtagagcatgtacatattagtgatgtgtataaagctgtagatgctgattgtgctgagctaaagcagcagttgaagtgggaaaaggaacgtttaaagcatatgaaaaaggtaagtggggtggagatgttattggggcatggggtgctttaatcagtttctaggttttatgtgcagccatgagactaccgatgatttgataaggtataaattctgaaataggaaatcgttgagattggattttttataaaatatagtgtggaaattataaaaattaaaagatcggatttatgaatgaaaaacttattcaattatcaaaagaacttaaacatagacctattttagagaaggctttaggttattttcctaacttacctttagttgctatcgattgtggctgtggcgctggcaatgaatctgcttatctactctcaaagggatttaatgttcatgcttttgatatttcaattgatgcgcaaaaagtctgtactgatagatttaaagatgactctaaatttattttctatcatgaatcttttgaagactttaatttcccgtcttcaagcttaattattgcttcatcaagtctgttcttttgtaacccaagttatttttatagcgtaattaaacgaatgataaatgctctttctgaaggtggaattcttgtagttgatttattgggaatttatgatgagtgggttattagagaacctacaaaatttataggatttacttatcaagatatagctgatttattcttatgtgattttaatctgctgtttcataaagaaattaatgaaaatttacctttattggaaggttatataaaaacatggcatcttcatatgctgattctacagaaaagtgatttttaaatatagaaaacccagaacctgcttgcacagattctgggttcatttaactaattaaattaaagcgcagcaatttgctccatattcgctttaactttatctaactgcgcagcaaactcagcaagcttcgctttttcaccttcaacaaccgctgctggtgctttagatacaaagccttcatttgcaagtttatttgcaatttggtcgtgttgcttttggattttatccaagtctttttgcaaacggccaagctcagctttagggtcaattaagcctttcattggtacaaataccgatgcatgacctacaacacttgaagaagaaagcggtggttcttgatctttacctaagaactcaatactttcaactttagccaatgctttgaacaacgcttcaatacgagtaatttgctcacgttcagcattagaaatgttttgaagtaatactggtaataaacgcgcattacctaagcccatttcaccgcgaatgttacgtaccgcaccaatcaaaccttgaagccattgcatatctgcttcagcttgttcattgatttttgcttgctcaggaataggatattgagcagtcataatggttgggccgccttgaccaagcattggtgcaagtgtttgccagatttcttctgtcaaatatggcattaatggatgagccaaacgtaatgatgcttccatgacagcaagcaatacacggcgtacttcagctttacgttcttctgaaacttctgcatcgttcagaactggtttagttaactcaacgtaccagtcgcagtattcattccagataaagtcataaatcgcttgagcagcaaggtctaaacggtaagttgcaaacgcttggtgtacagcagcttcagctttttgcagacggctgataatccattgttctggaagttcccaaagatcaggacgtgcttcttgaccgacagtttggccttcaacattcatcagaacgaaacgtgttgcattccagattttgttacagaagttacggtaaccttcaacacgttttaagtcgaacttgatgtcacgaccagtgtttgcaagggcacagaacgtgaaacgaactgcgtcagtaccataagcattaatgccttctgggaattctttacgcgttgatttttcaatcttcgcagcatctttcgggttcattaggccagtcgtacgttttgcgactaagctttctaaatcgataccgtcaatcaagtctaatgggtcaagaacgttacctttagacttcgacattttttgaccttcaccatcacgtaccaagccgtgaacgtaaaccgtcttaaatggaatttgagatgaaccatcttcatttttcatgaagtgcatggtcatcatgatcatgcgggcaacccagaagaagataatgtcaaaaccagtcaccaacacgtcagtcgggtggaaagttttgagttcaggcgtttgttctggccagcctaaagttgagaatgtccaaagtgcagatgagaaccatgtatcaagtacgtcttcgtcttgtttaagctcaacatcggccgcgatgttatttttcgcgcgaacttcttcttcgctacggccaacatagatgttgccatcagcatcgtaccaagctggaatacggtgaccccaccaaagctgacgtgaaatacaccagtcttgaatgtcacgcatccatgccatgtacatattgctgtactgctctggaacaaacttaatacgaccatcttgaaccgcttcaattgcaggctctgcaagaggcgcaatttttacgtaccattggtcagtcagtaacggctcaataatcacaccagaacggtcaccgcgtggcgcttttaagtcatacggttggatttggtctaaccagccttcagcttccgcttgagcaactaattttttacgtgcttcgaagcgctctaaaccagcatagtctgcaggtgcagtaatggttttagaaatttgttcaccagctttggcaatatattcaaattcacctaaaacttcggcatttttgttgaagatattgataattggcaagctattgcgtttacctaactcatagtcgttaaagtcatgagcaggggtgatttttacacaaccagtaccgaagtctttttcaacgtaatcgtcagcaacgattggaattaaacgaccagtaattggcaatacaatatttttaccaacaaggtgtgcataacgctcatcttcagggtgaacagcaacagcagtatcaccaagtaaagtttcaggacgagtcgttgcaactacgagatagtctttgccatcttgagttttaactgatttatcttcaaagaaatatttaaagtgccaaagtgagcctttttcttctttgctttctacttcaaggtcagaaagagcagtttgaagtttagggtcccagtttacaagacgcttaccacggtaaattaaaccgtcttcgtgcaaacgaacgaaaacttctttcactgcgtttgataaaccttcatccatcgtgaagcgttcacgtgaccagtctacagacgaacctaagcgacgaatttgtttggtaattgtgccgccagattgttctttccattcccaaactttttcgatgaacttttcacggcctaagtcgtgacgagtaataccttgtaagccaagttgacgctcaacaaccatttgagttgcaataccagcatggtcggtacccggttgccacaaagtgtttttacccatcatacggttataacgggtgagggcatccataatggcattgttaaagccatggcccatgtgcaaactaccagtgacgtttggtggtggaatcatgatacagaatgattcaccgtgaccagaaggtttgaagtaaccttgttcttcccacgttttgtaccacttcttttcgatctcggttggatcgtaggtggtggcaatattttgagcggtttgagcgtcagtcatagtagcttagatcgaatatgcataaaaaattgcatctattgtagcaaaaaattgcctcgaaattaatgtgctgaaaacagataaacggttttgtatttttttcaaaaaacggtagatttatgaagcatggatcacaatttaatcgtgtagaggcacggaagaaaaattacaaaagaattgaaaagggatgcgacacatgagctacaaagtttttttaaagatttccgattcaacctatacccagtttgcttcaattcgagagaaattacatgctggggtaagagaaagccagtcgaaagtattgggggatgttctttccgatttgtcgtgtgaaattattgagcaagttttctctgtattgttaaaggatgagcaagataactcgactatgactgaaaaacagcggtatgagtccgagaaagttcttcagcaaattttagatactttccgaaaatatatgccttggtcagtctcttttttcggtaatgaaagacttttacctttagttgattatatgacctcactcatgaaagaacgtgagcaagaggtttatattacatacccgatcacccctcaacttgtgcaacaggcccaaacactgacggaacaaatacgtgagggcaatatgcaaagcgtagaaaaagcttttcagaccttaattcaaattgtggatttaggtgtaacaagcctagtacgtgaacctaaaaaacgtttaaaatttaatttggttgtcgataaaaccctaaatggggtcattaatatgacaacgcatttgggctataaacgtttggaaaaattggggatgcaggttgatcaaacgaccgcaactcattatatcaaccactttttggcctttatgcatcaagcagcataacttaaaaagataataggaagttaaaatggccaaacttgatactttgcaaaataaagtggtgtggattacgggagcatcttccggtttaggtaaagctttagctggtgagtttgctttgcaaggggttcaagtgattttaacttcgcgtcgctttgaagagttagaagaagttcgcgttggtttactccatccggatcagcacttgtcggtagttgcagacattaccaaccaacagcaagttcaagaagcgtatgagcagattttaaaagccaaaggtcgaatcgactggcttattaataatgcgggtttaagtcaacgtgctttgattcaggacaccacgatggagactgaaagagccattatggaagtcgattatttctcgcaagtggcattaaccaaaactgtgctgccgaccatgcttaaacaaaagtctggccgagttgtatttgtgtcgagtgtagcagggctattaggtacgcagtatcgtgcaagttattcggctgctaaagctgcaattcacatgtgggccaacagtttacgtgctgaagtttcagatcagggcgttgaagtttctgtgattttcccgggctttgtaaaaactaatgtttcatttaatgcgctaaatggtgcagggcaacctcaaggccaccaagatgaagcaatcgaaaatggactagaggccgatgtttttgcagaacagtcagttaaggctttaatgcaaggacaggaatatattgtagtgggcggtactaaagaaaaattaggcgtgatggtttcccgtatgtcaccgaaactactctataaaatgatccggaaaacaaaagtgaaataaaaaaaagatttcgccgtgctaaattgatggaaaaacccgcatagaaggttcaccatggatcaagactaccatcgtattttagaggtcattacgcgttttcaattggtttttgaccagaaaaattgggatgcgtttgatgagttgttggccgatcaacttgaggtggactatttgcagtttagaggggagcctttatgtgtggtgtcttgtcatgaatttaaaggttctcggcaacaagctttgtcgcatttacgactacagcacaatttgagtaatcctcttattcggattgaacaagaccgagcatggctagagtgtaattatcaaatttaccgtttttcggaaaatgattattttcattcttttggtcgctattattttactttggcaaaacaacaggataaatggaaaattaccggaatttgccaacacttaactaaaaatattggcaatccgcgtattcacttttctgctatggggcagtgctagtctttgactgctgtaccataagcaaaaacctcaaccattccgccttgcataccgagttcggttgtactcagccgaactcccataatatggttcgcacctacactatgtgcttgttgttttagtcgtacaatcgcctcgcggcgagcacgctcaacaatactttcataactgctaagacgaccacctaaaacgttttttatagaagccagtacatatttaaaatagtcatgcgaaataaccacattactgctaataaaatgacccaactggtcgcttgtggcaaaacgattggtatcaattctgatatgggcaaattgttgctctttttctagaagctcatttaaatgttttcgttcaatatggcggccaaaagcccaaccaatactgaaaagaatgagaaaaataacaagctgaaaaataagattgtccattttctacctatgcactaaatggatcgggtagatgaggtgctggctgcacaactactgctgtgccatatacaaataattcagaagcaccttgggcaatatttgaggtagaaaaacgaataccaacaattgcattggcaccaagttgctgggcttttacaatcatacgttgcatagcctcttgtcgagattcttctaataattcggtataacccgtaagttcaccacctacaatattttttaaacttgccatcaagtcgcgacccacatgcttactacggacggtactcccgtaaacgacatcaagctgctttaaaatttgatggcctggaacactttctaaattacttaataacattgttttttatcaaactaaatttcttaagctttcaagataaaaaatattcagatgagttgcaataaaaaagcccaccaaagtgagcttttataagaaagtgatttaaaacttattgctttttaagttcagcactagatggttggtgaaccactgtatctgaagtatttgcttttaaaccaccacctagagttttgtataactcgatttggttgtttaagtttgcttgttgaagcaataacaaaccttgttcagctgcatatgaagaacgctgtgcatcaagaacagtcaagtaactatcaataccggcacggaagcgggcatttgaaagtgtgtagttgcggttagttgcttctactagacgttgttgtgctgttaaacgctcaccaatattggcacgagttgcaagcgcgtcattaacttcacggaacgccgactgaactgatttttcataatcagacaatgcaattttctgatcggtttcagaaatttttacattggcacggcgtgtaccccagtcaaagattggtaaatctaagcttggaccaactgaccatacaaaaccaccagacttaaatagatcacttaagtcagttgatgcataaccagccgaacccgttaagctaatggttgggaataaacgtgcttttgcagcaccgatattcgcacccgcagcgcttaagttgtattcagcagcttttacatccggacggttatttaacaagtcacttggtaaaccggcagtaaacacattttgttgagcaatgcgttttacaggttgtgtaggtaacaagttttgtggaacaggttggcctacaagcaagttcaacaagttttgtgcttgagcaatttgagttttgtagttcgctacatcattacgcgcagtttctacagaaatctgtgcttgacgtaatggaacttcactgtcaatacctacatcaaaacgttttttgttgagattgtaagaatctaactgtgctttaagcgtttgctctgccagtcttaagtttgctgttgcaaacgaataatttaaccatgcttgagcaacttggctaatcagactgatttgagtcgaatcacgagcactttgtgttgcaagataactatctaaagcagcatctttgaggctacgaacacgaccccagaaatctagctcataagcagttacacccaaacctacttgataagtagagtaggggttattcggatcacggctttgagaaacctgacgaattgcactaccacttgctccgattgttggaagctggttgttctgtgtaatctgatattgctgttgagcacgttcaatattgagcgttgctgtacgtaagtcacggttattggcaagagccaaatcaatcacttcaagcaaacgcgggtcagcaaagaactgtttataaccctgttcagcaatagacgtaccagaagcgctgttatatgcatagctttgtggtatatcggttttcacgactggttctgggccgcgcatgctttgacaagctgccaaagcaagcgcaagtgcagacaccgcaatgctacgacctgaaatagaccatactttttgcatcacgatttatgctcctgagtgtttatggtttttggtttgtacttaaagatactacgaatccacacatagaatacagggataaagaagattcctaagaacgtcgcgctgagtacgccaccaagtacaccaaagcctacagagtgctgacttcctgcaccggcacctgttgaaagtgcaagtggaagtacaccgaaaccgaaggcaagggtggtcatgataattggacgtaaacgcatttttgcagcatgtaaggttgcatcaagtagatcttcacctttttcctgcaattcttttgcgaattcaacaatcaagatcgcattttttgcagaaagaccgataaccgcaataatcgctacctggaagtaaatgttatttgagagatttggatctcctttaataatcatgcccaagtaggtcaatacgattgcaccaatgacaccaagtggtaccacaagtaaaaccgagaacggaattgaccagctttcatatagtgcagccaagcaaaggaatacgattaacaatgaaagtgcgtataagaacggcgcttgagcaccagactcacgttcttcaagtgataagcctgtccactcatagtcgaaaccttgtaagcccatagatggtaacttaccaataatttcttccattgctttcatggcatcaccagagctcacgccaggtgcaggtgtaccttgaatgttaaccgatgacacgccgttataacgttcgagacgtggagaaccatacgtccattcgcctgtagcaaatgccgagaatggaaccatctcacctttgttattacgtacataccatttgtttaagtcttcaggcatcatacggctgcccgcatcaccttgaacataaacttttttcacacgaccacggtcaacgaaatcgttaatgtatgagccaccccatgcaatacgcattgtattgttgatttcggcaatactaacgcccatagcaccagcttgagcctgatctacattaatttgatactgaggagtatcttcctgaccatttggacgcacacctacaagacgtttatcttgtgatgccaaacctaaaatcgtgttacgagctgcaatcagtttctcatggccttgaccacttgaatctttaagctgcaagttaaatccggcagttacaccaagttcaggcattgctggaagctgtaacggcataacgtatgatgcatctttaatgatcatatttaatgccataccacgctgaatcaatgaaccaatttgagtttctggtgtcgtacgtttgctccagtctttcaacttaacgaagccaatacccgcgttttgaccaacacctgtgaatgagaaaccagaaacagtgaaaatagattccacggtatctttttcattcataaagaagttagtcatggtatcaatcactttaccggtacggtcaagcgttgcatttggtggtaattgtacaagtgtcatgaccacaccctgatcttcttctggtaagaatgaagacgggagtttttggaacaagaagactaaaagggcaactacaacagcatagagcacgccagagaagattttgcctttaagcatgcggctaacaccattttggtagctatgcgacatgcggtcaaaaccattgttaaagcttctaaagaaacgcgcaaagatattattgcttggttctttattaggatcatgctgtttcaagatagttgcacaaagtgccggtgtgaacgtcaacgctacaattaacgacagaaccattgcagttacaagggtaatcgagaactggcggtaaattacacctgttgtaccaccaaagaaagccattggtacgaataccgctgtcaatacgctggtaatacctactaacgcaccagaaatctgctgcattgagcgagaagtggccgtaaccggatcggtatggtcttcactcatcacacgttcaacgttttcgactacaacaatggcgtcgtcgaccagaagaccgattgccaataccatagcgaacatggttaaggtgttaattgagaagccaaagatattaatgaccgcaaatgtacctaatacaactactggaactgcaagcgttggaataatcgttgcacgccagttttgtaagaataggaacatgacaatgaataccaaaatcacggcttcaattaatgtgtgtactacactttcaattgaaagacggataaatggagtcgtgtcataagccagtttatctgcaagacctgttggatagttcttacgtagttcagataaacgttgttcaactgcttcggctgtgtcgagtgcgttagcacctgttgcaattttaattgcaagaccagctgccggtttaccgttaaacttcgagtcgaattgatagttatccgaacctaattctacgcgagcaacatcttttaatcgaacctcagcacctgatgctgtgttctttaagaagatatttttaaactgttcaggagtctgcaataagctttgtgcatttactgttgcgttaagaacttgaccttgtacagccggagcaccacctaactgacctacggcaacttgcgagttctgcgcttgtaaggcagttgcaatatcactaggagtaagttgatagcttgttaatttagctggatcaagccagatacgcattgcgtatgagccaccgaagacctgtacctcaccaacaccggcaacacggctaagcggttctttaattgacgagtttacgtagtctttaatgtcagagtctgacaggttgttatctggtgaatagaatgcaataacttgcaagaagctcgcaccagatttagtaactgttacaccttgacgttgtacatcttcaggtaaaagcgcagttgcagattgcaatttgttttgaacttgaacctgtgcaatatcagggtcaacaccttgttcaaagtttaattgaatagatgcctgaccattaccagcactgttagatgaaatataacgtaagccatcaagaccattcatttgttgttcaatgatctgggttacagtattttcaactgtttcagccgatgcaccaggataagtcgcagcaatcgttacggttggtggtgcaatcgttggatattgtgcaataggcatttttgttagcgtaagaatacccgccaacataatgactaatgcaatcacccacgcaaatatggggcgatgaataaaaaattgtgccattcaatctaccccttatgcatttgaagctgctttctgttctgcttgaggtttacctgattgagccggtttcgcagcatttggtgctgcaccttgagagtttgctggttgagcttgataaggttttgctgatacttcttgcccttctttaactttggcaacaccatcaacaatgactttatcgccggcttttaagccgttagtcacaatccaattttgtccttgaacaccagaggtttcaacaggacgactctcaacaacccctttagcattaacaagcatcgctacagcttgccctgtaggtaaacgagtaatggcagcttgaggaatcaggtaagcatttggaacaacgccctgaacaatttgcgcagtggtatacatacccggaagcaataaatgattcgggttagagaatacggcacgtaatgtaattgttcctgtatcttggtttacagaagcgtcagagaaagcaagttgcccttcgattggataggtagaaccatcttcaagctttaattttactttcgtgttgttactgttatttaaactgcctttacttagttgttgacgtaaacgcaataactcagcactagactgattaatatcaacatagataggatctaactgttgaatcgttaccaacgggtcagtctggtttgcagtaaccaaagcaccagccgttactgaagaacgaccagattggccagaaataggagagcgaattgtagaataaccaagatctacatttgcatttgttacttgagccttagctgctgcaacttgtgcttctgcaacattgacttgaccaagtaagtcatcatattcctgtttagacacagcattactagaaacaagttgtttataacgatttaacttggtacgtagtgaagctagatttgcctgttgttgtaggagtgatgcttttgcattttctaacgttgcacggttcgttctagagtcgagctcataaagcgcctgaccttcacgaacatagcttccttcagcaaataagcgttttaaaatcacgccacttgtctgaggacgaacttcagaaatttgatatgctgaagtacggcctgaaagctcaacgctttgttcaacactttgtggttgagcaacaataacacctacttctgcaggcggcattttctgagcagcagcagcttgctgtttctcatcggagcctttgctacaaccaacaagcgcgatacttgttgctaatgcgcaagcagtaagggctggtgcccaaagcttagccgacatcattgttccacctcgtttagataaaatctaaaaatatatttgttttttacttaacctactttgtgtttgtaataaccagagccaaagcagtgcaatccaaataaaaccaatgccccaaccagcgagtacgtctgttgggaaatgaactcctgcatatattcttgaaagccccatacacacaaaccaaagacaggagatcaaaacaatataaggagagttaatgttgtgcttatggcataacataatcattgccagacaagccagtgttgatgcataaacactatgtgcacttgggaacgatgcaccataactttcaacaatatgatatgcctcaggaggtctaggccggttaacacaccacttgagcagccaacccatggtgatactgccaataactcccaagctaatgaaaataacagtaatatattttttataccatgctaaatatatacatactagaaaggataaaaaacatacaaaaggcatgccgcctacgcgtgcaagaaaggtggttatagtattaagataatctaaacgatggtgactcaatgtttgaacggtgagcaagtccaaagattgaagacttggtacaaaaagaccaagaacacctaatcctaaaaaaacgcaaccaatacaaagcaatagatagggcataaacacacctttgcttattcatatagtttttcactattgaacgccgttgaaagtgtacttgccagtacactttttttcaagcctgatagatcatcgtaaattcattttgaaatttttttaacatttggaaaaacaatcacaacaaaattgacggacatcacattttgtgtacaaagcaaaacatttaatgttctgctttttttccgctattggcttgggcattttcttctaattctagaggctgtttcggtggccagaagaagtcacttggtcgggtaagaaaatgggtcatgaccagtttagctaatggcttccattgttcaaagcgaactcgacgtgcacgtaatgccacaataatagtgagtgtgaaactcacaaataagttggtgagaccaatacagagtacgcctaaaaatgaaactataatcaagccaatatcagggctaccattaatagtcattaaaccttgaatgaagttcgctgaagcaaaagcaatgtgacgaatatctagaggtaggcccaaaataaagccaattgttcccatacttcctaacattacgccaaataggaaattacctgcgagcgcccctaaattacgttcaatatattctgcaaaacggttcaggcgttcttgtccaaataagtttcttaaacgtcgatgtgcttttaaacggggtcctacttttctataaactgccatgttgtcgaagtagcccgcaattaggccagataaaaacaaacacaccccagcaatcgctgcatgcggaacggctaatgacgtaaaagggtttaggctgtgtaatagataagttgccttggtatgagttaataaaggctcatcaagatagaactgccaagcaaaggtaataagagcggcagtaggaattgcaatcgagatattacccaaaatagcaataaactgagttcgaataatattgataataagtgcggctaattctgcaatttgtgcagttttagagcctttacgttgctgtacagttgcagcgagggcagcggctgtcattgcgggttgttttgttgcaacagtaaagtgcaatacatgaatcagaataaagccaagtgaatagttcatactgaacgtaaaggcttgcatgagcggagccatagtcatacgtgcagcaagaatttttaatgaggccatacaggcaataatcacacctgcaccagcagcggctttatacatgccccaaaagcctttggtgtctgtacttacataatgttcgccagtacggcttgcattctctgtgacttgaaaggcaataagctcactggtcgtgctgagtaacgagcggacacttttttcactataatgtgctttagttaagtctgaaattaagtttcctaaagaaacgtagcgtccctcgctatcgtctacaactagatagagtaataattcaatccgatctaaacactgttcaagtaaagacaaaagataggtcaaacttaaactaacaccgattcttttggtcgctcgacgtatttttaaaacgacgtctcgacactgctctagcattacaaatgcttgagaggcatcaggtggtggaagcacagcaatgtcgttgctggaaatatcctgttttttgtacttctctataaactcaataatttcacggttttgtaccaaaaatggcgattcatattcggttaattcaggttgagcgttaataaattcaggataaagaccgataccactaatacggtaagataagacagtaattgccttaatcatttctcgctgaatggcatgcttttcatcgacattactgttactttgcccaataagtccgaacaaagttgcccaatccttgtcatcaacattgtttaaccagattgaatcactttctaaatagaaaatttttccaatcagaatttttagctggcttgcatcttcaataagtggcagaaaatggccgccaagtctttgcccaagctggttccagaagccatctaaagacaaaataccgctatctgcatataagctgacttgcttatattgattaatgaggcgtaataaaaaggtttgtaaaagggctggagcggtaggagtaagtaataggctatcaataaaggcttgtattttttgctctatttcatccgtatcgtgaggatcggatggccgtaaagcattgactaagtcaatgagaatattttcgtcaataacagcttgagggttttcaagctgtttctggattttaaaaaaatgttctgaaaaatttatatgcataggcaaaataatatctactgtattcgatgtaatgcaagccgagttaaattaatcaacgcttgacgataaggtgtatcaggcaagattgataaggcttgcagtgctgcttctgtttcttcttgggcacggcgctggcaatagtctaaagcaccagacttttgcacaatttcaatcactttaggtaattggtcaacaccaccagtcgcaatactgcgtctgataatggcatgctcttcaccggttgaatgtgctaatgctgaaattaacggtaaagtcggtttaccttccattaaatcatcaccaatatttttacctaatgtttcagcatctgaagtgtagtctaaaatatcgtcaataatctggaatgcatttccgaaatgacctgcaaataatcttaaaggttcgcggtaagcttcttgtcctgccaaaatagccgcaccttcggttgcaagttcaaataaacgagaagttttcccgtgaataatttttaaatatgtttcttcggttgtatccggttgatgctgagattggagttgtaatacctcaccttcagcaatttcacatgtacctgttgagaagtcttttaataaggtcatgttgtttaaatcaaccaaaaggtcaaaagcgcgggcaataaggaagtcaccaaccaatacggccgtttgattgttccatgttgcatttgcagtaggacgaccacggcgaagtccagattcatcaactacatcatcatgcactaaagttgcggtatgaagcatttcaataatagctgccagacgctgtgcattttgcatattgtcgaggccgcaagcgcgtgctgcaagtaaacacatgattgggcgcatacgtttgccgccagcttcaactacatgtttactcactgacatgaccaagccgacttttgagctaattccttcattaatcaagtgatccatcgcagcaaagtctgtagcaacaggagcgagaatgtcttgcttaaaatcgatgaccatatgaagaaaaaccccgtattggtagataagtggcgttagtgtatcaattaaaagtgcattaaacagggaaacaagcaattgatattaatcatttgtatgttcatgaagagttctttgttctttatttcggcaaaacgatgtgtttccgacaaaacaataaattttaataacgtcaacatgaatacagcttgttcttgttgcaagttgtgtttggaactgtattttaaattccattcagaatcaatgaaaagtactaaaatcaaattgaagctatttttattatgtaagaatgatggcttctgttgcttagttaaagataaagcacttgtcgtttgatcaaatttcacttaaaatctgtcgccttgtataaccccagtggcgttcgttttaagatcgatatatccctttatcggcacgacgacacgggctgattggagtacgttatgtacgcagtaatccaaagcggtggtaaacagcaccgtgtagttgagggtgaaacccttaaagttgaattattgaaggctgaatctggcgcaactattacatttgatgatgtattaatggttgtaaacggtgacaacattcaaatcggtgctccagttgtagctggcgctaaagtaactgcagaagtgattggtcatggtcgtcacgacaaaatccgcatcatcaaaatgcgtcgtcgtaaacactaccgtaaacaacaaggtcaccgtcaatggttcactgagttgaaaattactggtatttcaggctaatcacgaggagtaagagacatggcaactaaaaaagccggtggatcgacgaagaacggtcgtgattcaaacccaaaaatgttaggtgttaaagtttacggtggtcaaactgtaactgctggtaacatcatcgttcgtcaacgtggtactgaattccacgctggtgcaaatgttggtatgggccgtgaccatactttatttgctactgctgacggcgtagtaaaattcgaagtgaaaggtcaatttggccgtcgctacgtaaaagttgaaactgtttaagttttagcttaagaaaaagcccacattttgtgggctttttttatggaaatacatcaatattgtcttcatgatgatgaatgaaattctacaaacaacatgaataacataacaaaatatcttattttctcaatgattagcacaaagtttgtcggttaatataagtcttgaatgaagagcttgtttagctggattaattgaaaggctagcaagttatcttacagcaactaaaaaggtgatgacatgaatatgcttcgtaaaaccatgtgtgctattacactcagcgcctcagtgcttgctcctgtaatgagtactacagcgttcgctgcacccgtagcagcaccggagcaacaggcaattgggaacctggtaaatcagttatcaggcttacagcgtttgactgccgattttgaacagacaacgaaagcgaatacaaaaactgtagcacagaaaaaaggcttaagtgctcagcatatgaaccagacatttaaaggttcaatgaaagttgaacgtccggggaaattttattgggaaactgtaagtccctctaagcaaactattgtaacaagtggaaaaacagtctggatttatgaccctgatctacaacaggctgtgcgccaaagcctagatgatcaggtcgctgatacaccggctttattactttctggtaatactaaccaaatcatgaagtcttaccgagtaactcagccagataaatctaagttatatttcactttattccctaaaaaagaagatggagctttccaaagcttaacgattagttttggtgccaacaaagcacctacactcatggtattgcaagattctttaggtcaaacgacttatgttcgtttcaagaatgttaaagtaaatgcctcaattccggcttcaactttcaattttacgcctccgaaaggtaccgatattattgatcaataagcctgattatttagaaagccatctttacgatggctttctttttatatatcaagcctagatacattttttaaccccgtcttaaacttacgctttgtatagtggtaggagtgagtttacggggattaacatgcaactttacgataaaaaaattattttcattcttccaatgttagctgccatggttgcggtgagcggttgtcagccaaaatctacggctaaagatgaacaaccggcttctagtgcttcagtaaaagagcaaaagcaagctgaagtccctgtcattcaagcaaaagttgttccggtaaagctgccaaaacctaaagtttgtcttgaagacggctgcactgaatatgattttcagaccgtacaaaccaatcaaaaatggattaatgattattttacgaaccgtataaagaaagcagacccgaatgcttttgcaaatttggctgataaacctgttgaggtaccggaaggggagccgagctcaagtcagagtgcaatctatgtccgttatttagggcaaaattataaccttgcaacctttgcattccagacatattcatactctgcgggggcagcacatggtatgtcacatcaagagtttgtaaattttgacttgctaaataaaaagcacattaccgttgaagaacttattaagccagatgttgaaaaacagttagttgatgcgctttttgatgcaaatactaattggcttcaagagcacaatattagccgtgaaaaactgcaattaagtgataatttctactatggtgcaaatgggattgtttttgtctatccaatttatgaattagcttcttatgcagaaggtatgtctgaattaaccttgccatattttgaagcagctaaatatattaaacctgagtatttaccgagtgtaccgaactataacttataaaatataagatctattctaagaattgtgtgaaagctattcgttatgaagatgatcactatattttttagtgttaagggcttacactatagccagttttttacccatattatgattgattatgatcgaccctaagttactcagaaataatattgaagtcgttaatgcagctttggcaaaacgtggtgttcagttagatgttcaagaatgggcatctttagagactcgccgtaaagacttgcaatcaaaaactgaaaagttacaggcagagcgaaatgccggtgctaaacaagtgggtcagattaaaaaatccggtggtgatgcttctgaaatcatggcacgtatgcaagccattggtgatgaaattaaagctgccgaagttgctttatcagagctacaaaacgagattgagcaaaaagcgcttagcattcctaacttgccggacgaatctgtgccagctggtaaagatgaaaatgataacgttgaaatctcaaaatggggtacacctcgtcagttcgattttgaaatcaaagatcatactgatttaggcgagtggatgggcggactagagtttgaaactgccactaaactcacaggctcacgttttagtgtgttgaaggggcctttagcgcgtctacaacgtgctttaactcagtttatgctcgatacccatactttaaagaatggttataccgaagcgtatgtgccttatttggtaaatgctgattcattacgtgggacaggtcagttaccaaaatttgaagaagatttatttaaacttcaaggtgaaaaagaatactacctcatccctacagcagaagttccagtcactaactttgtccgtgatgaaattattgatgcagatcgcttaccattaaaatatgcggctcatactccatgtttccgtagtgaagcaggttcttatggtcgtgatacacgtggtttaattcgtcagcaccaatttgacaaagttgaaatggtgcaaatcgttaagcctgaaacatctatgcaggcacttgaagagcttactgcacatgctgagggcattttacaggcacttggtttgccttaccgcaaaattttgctctgtggtggtgatatggggttcggggcgactaaaacttatgatttagaagtttgggttccaagtcaaaatacttaccgtgaaatttcaagctgctctaatatgggtgatttccaggcacgtcgtatgaaagcacgctaccgtatggatcagaagaagaccgaattggtgcacactctaaatggttcaggccttgctgtagggcgtactttacttgcagtaatggaaaactaccaacgcaaagacggttcaattgagattccagaagtattacgcccatatatgggtggtgcaacgtttattgattaagctttgcatctaaagtgtgcacggtttttgcttaaacatagtcagatgatcgatgtagaggtttaaggtggatatttttccaatctctttgaagttgcaacagcaacgttgtctgattgtgggcggagggcatattgctttacgcaaggcaactttattagctaaagcaggagcaataattgatgttgttgctcctgcaattgaagatcagcttctgcaattaattaaaacaacagacggcgagccgtttattgaagcttttgctgaaaaatttttaagtacaccctatcgtttagttattgcagcgaccaatgatgcagaagtaaataaaacagtttttgagcagtgtgaagcgcgcaatttacttgtaaatagcgtcgatgatattccacattgtcgttttatggtgcctgcgattattgatcgatctccattaattgtttctgtggcctcaaatggaacatctcctgttctatctcgtcaaatccgtacgcagttagaaacctctattccacatggcatgggcaagttagctgagttttcaggaaaatggcgcaatcaggttaaagaaaaaatttctaatccagatgagcgccgtatattttgggaaaacttgtatgcaagccccttaaaagaacaagtttttaatgacaatctagatgttgccgatagcatgcttgaacaagcactgcaggagtggaaagcacctaaaggcgaggtttatttggtgggtgcaggtccaggtgatcctgaactcattactttaaaagctttacgtttaatgcagcaagctgatgtggtcatttatgaccgtcttgtttctgcacctattttagaattgtgccgtcgagacgcaacaaaaatatatgttggtaaagcgcgttctaaccatagtgttcctcaagaaggtattaatgcattattggttgactacgcgaaaaaaggtaaacgtgtttgtcgtttaaaagggggagacccttttatttttggccgtggtggcgaagagatccaagagttattccaagctggcgtcccatttcaagttgttcccggtattactgctgcgtcaggttgttcagcttatgcaggtattccgcttacccatcgtgattatgcccagagtgtccgctttcttacaggccatctaaaagaaggttctcctgagttaccgtggaacgaactggtatacgaaaaccagacattagtactgtatatggggttggtgggattagagcgtatttgtgagcagctgattgcgcatggacaacgtccagatatgccagttgcattaatttcaaagggtacgacacctgaacagaaggttgtggtggggtcacttgctgatattgcatctaaagtgacagaacatcaaattcatgcgccgacactcacaattattggtgaggttgtacgtttgcgtgaacagttacagtggaattagtaggcttattgatatctgcaaaagagatgtaattattgcctgagctaaccaataagtaatttaagtgagtaattaagtgattcatgttgttctatacgagcctgagattcctgctaatacaggtaatattattcgtctatgcgcgaatacaggcgctcaattgcatttagttaagcctttaggctttgaacttgatgataaaaagcttaaacgtgcagggcttgattatcatgaatgggcaagaatgcaaatttgggacaacatagagctttgtcttgcggacttaaaagcaaaaggtgttgagcatgtttttcctttaactacgaaaggttctgctacgcctcatacagttgatttaaatagacctgtggctttattgatggggccagaaacacgcggcttgcctgaacatgttcgtctgatgttccctcaagaacaatggattcgtttaccaatggcagaaaactcaagaagtttaaacttatctaatgcaactgccgtaattgtatatgaagcatggcgtcagcaaggctttaaaaaattaggttaatttcttaagttctaaataaaaataaggcccttagtggccttatttttatttaagcttgttctagtattttttcgtcatacatgatttgggctgctaaaacttgctcaatattagtttcagcccattcttttaactgatatgccatagcagctacattttgcccaagtggcgtgagggaataatcgacacgaataggggaagtatcctgaatttttcgttcgataaaaccgtctctctctaacatttttaacttctgagacaagactttaggtgaaatcccttcaatattttttttaagtaagttgaagtgctgagtttcatgctcaagaatatttaagatgagtaaaacccatttgtctgcaattttttcaaaaaacagtcgagcagggcaatgttgttgaaaaatattatattttagacattctttcatctaatttaccctctcttttctaaaaaaataggatagttaccaaatggtaactaattgacacctagtatctaaaatatatcattaaatggaatttaataaaacataggttttcttccatgtctaattctaatattgcggttgtatatttctcaggttatggccacactaaagtagtggctgaaacttttgctaatgaaattaatgctcaacttatccagattgatcaggaaggtaatatcactgagcaagattgggaaacattgaataatgcaaaaggtattgtgtttggtgcgccgacctatatgggtacagcaccatggcaatttaaaaaatttgctgatgccacttcaaaagtttggttcacacgtggttggcaagataaagtatttgcaggctttacgaatagtgcaagtttaaatggggataaacaagttacgcttatccagctgcaaactttagcatcacagcatggtggcatttgggtgagtctgggcttattgccagcgaatactaaagatgcaacacgtgaagatgtaaacaacttaggcggttcggtagggcttttagttcaatcaccttcggatgcaagtgtagatgaagtcccaacaggggatttggaaacagctaaagtttatgcaaaacgtgtacaagccattgtaaataaaatatatggttaatgagtccataaaaaaaggcgcttttaagcgccttttttgttattcatgctcattatgttgaggagcattatatttaaagcctttggttttataggcaagataacctaccccaaacactgcccaagctaagccaatttgcaaagcaagcttgtcaatttctaaccacattaagaacacactagcaaagccaagcgttggtacaataatgtaattaataatatctttgatagatttgtttttaccatctctcagcgcgtagcgcgaaatcaccgagaagtttacaaaactaaaagcagttaaggccccgaaactaattaagttaacaatatgttcaaggtctaaaaagccagcagataatgcaaccacaccaacaataagaatgttgtaagtcggagtatgcaatcttgggctaatatgaccaaacaactttttattaataaccccatcacgacccattacatacattaagcgagatacaccagcatgtgctgaaataccggatgccattactgcaactacagcaaaatataaaactaatgttttaaatgcaatgctgccaattgctgcaaccataacaggttgtgattcatctaacggtttaaaatagatgtttggattgctagggaaatacaactggataaagtaagtgcttacgataaaaataatacctgcaagcaatgctgttgagaaaatcgcttttggaagcgttttttcagcatctttagtttcttctgcaagtgaagataaagcatcaaaacctgtaaaagaaaagcacagtactgttgcaccaccaatcaaagcactaatagaagtcatatcattccaaaaaggagttaatgaccataattcggctttatcgggattaagcgtaccatcagcatatacgccttgggtaaggagaatatatacttgataaacaaagtaaaaaataacaccaagttgaataactacaattgtactgttaaaacgcgcgacaaagcgtgcgccaaataagttaatcacagtcattaatgcagttaagccaataacccatagccaattatttacttctggaaacaaagctcttaaataaatatcggccaaaatgatattgacgagtggtgaaagtaaatagtctagccaagatgaccaacccaccataaaaccaacattagggtgaattgacttttgggcgtaggtatatgctgatcctgaagaaggatagcgtttgatcatgtgtccataactgatcgacgtcaataaaattgcaactaaggcaaagatataagaagtaggtacatgaccaccacttcgttctgatactaaaccaaaagtatcaaataaagttaatggctgaatataagctaaaccaataataatgatgtgccaaagcacaagattcttttgaagtttagctgttggtttagtcccagataagtttgtcaacggcgttatcctcataatcgttgatcaaggatcagcttggtgttaaggatcgtttgagacgaacgatcccccctacataaaagataaagtgcgccaatctatcctaaattgatgcaaattgtcagtactttcgtggattttttagcaaattttttgccatatttccaaagaaaatgatgaataaaaattcatagatataaaaaaggtctgatttgtcataaaaatcagacctttagcttttttctttagatatctaaatcttaacttaccaagctttttgtaagatctctcgtagatcttttaagcttgcttctttaggattataaataattgagccatcatttagtgctttctctgccacttcatcaagctgtgcttcagtaactttacctgtttcacgtaaggtacgtggtaatttggttaagctaaataaacgatcacgcattgctaaaatagttgcgattgctctgtctgcacgctgagtagcaggagtctgggcataaatatccgcacctgcaagtggtaatagcaactcgccaattttctgaccattgacttgtttattgtactcaagcacataaggtaagaataagttcatgcacagcccgtggggcaggtgagcaactgcacctaatgcatgtcctaatgagtgtacaaggcctaccatcgagttagagaatgcgatacctgccattgtagaagcttgtgcaagttctaaacgaccttgtgagtcatttggattttctaagacattaaataggttttcgctaatttttttaatacctgcacttgcataggcatcgctaagcgggttagctgccatacaggtgtatgcttcaacacaatgtgttaatgcatccatgcccgtcattgcagttaagtgaggtggtaacgttaatgtcatgcgtggatctaaaatcgcagcatgtggcattaagtaatatgaagcaaatgccaatttaacattcttttgtgtatcagacacaacagcaaccatggtcacttcagagcccgtacctgatgtagtcgggatgacgaaaaatggttttaatggttttggtaggttgtgtgcaccagaatattgaagaagatcatctccaccttctgatactaaaatgttagttgctttagaggtatcgataacagaaccaccacccacagcaataatcgcatcacatttatttgtgcgataagcttccgcggcaagtcgaacaacttcaaggcttgagtctggtggaacatcatcaaaaacatgaccaatgactgcatcagttgtgctaaaagcagcttcaatagggtttaacaagccatttgcacgaacacctttatcggtaatgataagagggcgttttgcacctaaagtcgcaagttcaaacggaatatgttctaaagcagcattaccggcaatgacttttacaggacaaaagaattcgtaatatggtttagccatgttatgcgctccgcttgaagtaagacttagctacttttaaataaatatttgcagcctggttgaatttttcttttagggtaagttcagttgggtattctttaacagcgagtgaagccaccaatttcggtaaaatgagggactccattttattgaggcagcgaactaaacgaattgctgcagatacatcaccatcagcaatcatacggtcatttgcaaaggcttgagcagtactttcctgaaaagagaaaaccaaaaaagcatgagttacatgcttaaacgtaatggttaaatcaggctttttttccgctcttttcagcagttctaattgtttatcttctgtcactcgtgcaaaaaatgctggtccatttgggaagacattcattgaaagtacaaagtgaacaggaaatttagacacttcctcttgtatttcactatctacttgactcgccatgactaagcctcgaccaacaacgtccatcatgagcttaacgtaggcaagttgcagagtgggctttacagcttttgtcgaaatcacttgctatcccttcttaaaattatgcaaaagcaaatttagagtaattactctaatatatttttattccatctcaaaatcatttattcaattttgacttctgggtcattaaagtacccagtacctttaatatactcaataaagtcctgacaaagttgttcaaataatggatatggagtcactaaatcttgtatgcggaccatttctagccctgcataaccacatgggttgatggtttgaaaaccagttagagcacagtccaagtttagggctaaaccatgataactacgtccacggcgaattttgaagcctaatgaaccaatctttctgccatccacataaacgcctggtgcatcaggttttgcatatgcttcaatgttatatttctttaaaacatctatcataaattgttcagcaaaactgaccaatgtgcgtacattccatttcagtcgattaaggtcaaacataaagtaagcgacgagttgaccaggaccatgccaagttacttgtccaccacggtcagtttgtactacaggaatgtttgatggaatcagaatatgttctggttttcctgcctgaccttgagttagtacttcatgatgctggagtaaccacagctcgtctgctgtattttcatcacgttgattggtcaggttcttcatcgattcgaatttgctttgataatcttgtaaatcgttccactgacgaataatcaaagtgggtttatcaaggctcattaaacattttcctgtgcatagtacttaacagaagggaagtctctcaactttaaattatgagagtatgcttttgatgagtttaaagtattttgcttaagcggttctaaatatttgtaattatttctataaagattggtataaataaaaatgccatgacattaaatttgtcatggcattttaaaattaaagcgcagttcttatttgcggacaagcagccaagtctgcatataaagcatgcacttgttccaattcatcaaagcgtaattgcgcggttaatgaatggtatttgcctgtacgtgattcttgtacttttaacgttgtttggtcaaagtcaggaaaatgtttcactagaatatcaacgacagctatacgtaattcttcacccgcatcgccaatgagtttaattggatagtccattggaaatacccaaaggtcttcacggagttcgcgagatggagtgcggtctaacataagtaacctcatcatgtgaaacgcctgcatcatcgcaggcgtttatagctctttctattaaatggggactagtctcgaaatttcaagatttcaaaaattagtcattctctaggaaagaacgcaagtgttcagaacgagaagggtgacgtaatttacgcaatgctttcgcttcaatctgacgaatacgctcacgtgttacatcaaactgcttacctacttcttctaaagtatgatcggttggcatatcaataccaaaacgcatcttcaatacttttgcttcacgttcagttaagttttctaaaacttcacgagttgcttcttttaagccttctgaagtcgcagcatcaattggagaagtgatgttctggtcttcaatgaaatcgccaagatgcgaatcttcatcatcaccgattggagtttccattgaaattggctctttcgcaattttaagaaccttacgaactttaacctcatccatttctaagcgttcgcctaactcttcaggagtaggttcacggcccatttcctgtaataattgacgcgatacacggttaattttgttaatcgtttcaatcatgtgtacaggaatacgaattgtacgagcctgatcggcaatagaacgggtaattgcctgacgaatccaccaagtcgcataagtcgagaatttataaccacgacggtattcaaacttgtctacggctttcatcaaaccaatgttcccttcttgaatcaagtcaaggaactgtaaaccacggttggtatattttttcgcaatcgaaattaccaaacgaaggttggcctctaccatttcttttttcgcacgacgagctttggcttcaccaattgccatacgtttagaaatatctttaatttcactaacgtttaggccaagctctttttcgatatctgcaattttttgctggaaggctaaaacatcaggacgcactttttccaagtgagccttgatttcagctggagctttagcaatttgttcatctaaccaagcaggattagattcctgtttcgggaaagatgtacggaactggttacggtccatacggccacgacgtactgcataacgcataatttcacgttcattggcacgaatttgttcatgagttccgcgaatcatttctgaaatgatgtcaaataaacgtggagtaaatttaaacatcataaatacagttgctaaagactcaagagcttcatttgcttcagggctattacggccatgtttttcgatgacagctttagtttgagcccatgcagcttctaattcagcaaaacgaacttttgcaacttcagggtctggacctgaatcaccttcagaatcatcatcaccttcagactcttcttcttcatcgtcatcatcaagcttaacttctttcgttgactttgtagatgattcgtcttcttcctcaagctcttcaacatcttctaaaacttcaggaatatcttcgtcagtttcagggtctaaataaccagataagatatcggcaagacggcgttcgccagttaaaaaatcattatattcttttaatacaacttcaacagcatttggccagtaagcgattgagttcaagacatcacgaatgccttcttcaatacgtttagcaatgctgatttcaccttcacgggttaacagttctactgtacccatttcacgcatgtacatacgtacagggtctgtcgtacgtccaggctcattttcaacagatgcaagtacggcagcagcttcttcttcagcaacttcatcagttgcatcagctgattcgccgaacatggtatcgtcagattcaggtgcacgctcgtgtacaggaataccaacgtcttgaagcatctggatgatgtcttcaatctgttcgctttcagtaatcgagtccggcagatgatcgttaacctcagcgtaagttaagtaaccttgttctttgcctcggctaatcagagccgctacttgagaagtaggggaatgcatatcgctcatctttgcttactctttgttgaatctgtggcagtgaaaaaccgtgcatgatagcacaatttgcttgaaatgtttgggctttgatcggtgaccgttaaataaaaaatatctttgaattcacgactattttttgaatattgggctaaaatcatttttttcaaggttaaatcatagaaaaatttgtagaaatcttcgcttatcaaaagattgttctgttttataaatacacaattttttgggtgaaaaaaagtacaaatgagcaattaaatgaaaaaaatataaataaaacttgacaaggaaaagtaagacagataaatagcggctagacccattcacattttttcattatgaggtagttttagtgtcttctacagattttgaactagatgataactacggcgatgatgatgatgtcggttttgatgagtcatcaggcaaaatcagtgcaaaagaatcgttggaaaaacgtagattaattgatgatctattggcacagcgccgtttagagcgtgagttaaaagatttcgattatgatttagacgatgatgatcttgatgacgaagactaatcaaaactaaatagggcatcgtcagcttaagtgctatgctatcgtcaatttctttttaaagtcaggtaacacacaatgagtgcattagatttagaccaattaagtgaatatctagatggagaccacaatgaatatggtctagactttgctgcaactcatggatttttgtgtgcaattgcagtaggtcctcagtttgaccgttggttagatgaattgttcgaaggtaaccagaaaaaggttccggctgaaattattcaacaaatcaaggtttggctagagtcgattcgtcaagatttagcaaatgaaaatgggattgaatttccatttgaagttgaagaagctgacgttgaatcaagcctaggtgattggagtgtagggtttgttgacgcaatgttcttaaacgaagaggcatggtttgcccctgagtatgaagaacaattggttgatttgactttaccaatcatggtttttagcggaattgatgaagaagatccacagatggaatctttccgtcgcaatggacagttaatggatgaactggcagaagaaatcccagataatttgaatgagttatatttgatgtaccatactccaaattaatttattagaagaaataataaataacgtcctttctagggcgttttttatgtttttagtatttttaatacataattaaatataatatttttacattaattttatttctatataattaccagcaaaattttttgatattactctcttaatcaaaaaattaatttatctcgccatgaatattttattggcgtcatgaaaatctttaatatgttaacaacgtgatttaatatgaatataatttttaaaattactagcgtactctcagtaatattacttgtagcctgcggtgatgaaaatagcaacagtgtcagtgaagaaaaaattgcacaatctacccaaaatcaagttacttataaactaatctctggtactgcattttcaacttctgttttaaatggtgcaaatgtaacagcaatttgtaaagatgggcttggtttcaaaaataaagtaattgttaatgcacaagggcaatggcaaggggaaatagacaccagtaaatttccttgtcgtttagaggcaaaagctgaggggcaaacttatcatagttatatcgaccatgagggaagggtaaatattaacccgctcacagatatggttgttgcttatgcaagtaatcaggttcctgtaacatggtatcaatctggaagtatgactacagaaaagttaaattcggcaaattctgctttggtcgctgaacttattaaaaaggggtacggtattaataatgatatggatctatttactgctgagatgaaagcaaataaccctattcatcaagctattcaagagttgttggaagctattcagaataatagaaatattaaagattatgattcactattaatgttaattaaagatgggaatttatctcaagtacctgagaaaatagagtttttaaataatagtgtagcaaaagtttttggttttaataaagatgcttgccaagtacttccgaaaacagaaaataccgaacaatataataaatgctctgataaggttattgatgatttttcggaaagtaatttagttgctactgattctgatgaaaaatgtattttggtcaaacaagggaataaagtaagtttcactaaagggaatcaaacagtatcggcattattggataaagaacaagaggatggcatggactttacttttgatgaaggtgaattagaaattatagatcttataattaatacaggaccttatacagatataaatacctatagtcagattggattaagcttttctagtgatgggaaattgagggctgttgttggaaaatctccaatagtgtcttcaatgaattgtgctagcccagagtttaaaaagcttatggagctttataaataaaatagaaaaaagagggcatcaaatgatgccctcttttaattataaacgtttacgtttagcggcagcaatttgtgattggcgcatacggaaaccagctttttgtttttcagtagttttatcaatacaatacaagcaagaaacaccatgttcatagcttggtagcgcagactcttcaggagttaaaggccagccacaagcatgacatttaatgtttgcaccttcttcaacaccatgagttacagcagtacgtccatcaaatacgaaacattcaccttcccaaaggctttcatcaggaggagtttcttctaaatatttaagaataccgcctttaaggtggtaaacctctttaaagccttcttgaagaagcaaagaagttgatttttcacagcgaataccacccgtacagaacatcgcgattttcttatctttatgttgttctaactctttttttacatattcaggaaattcgcggaaagtttctgtttttgggtcaatcgcccccttgaaagttccggctttatattcatagtcattacgtgtgtcgattagaatcacatcatcacgtgcaataagctcattccattctttaggatcaagatagtgacccactaaatcacgaggttttacttcaacgcctaaagtcacgatttcttttttaagcttaattttcattttacggaaaggtttgtcagaactatgggattctttatattccatagcgttaaagccttcgtttaacaaaaattgatgaatcgtatcaattgcctcacggtccccagcaacggtaccattaattccttcacctgctacaatcagagttccgcaaaggttaattgttttcactaagtctaaaagacgttgttgaagatcagctggatcttgaacttctttaaattgatatagtgctgcaacaacccaacccgcggtcgcttgctgttctacaggtgcaagctgttctacagtagcgttcatggaaaactccaaatgtattaagatagaaatttaaggcgcatattttagcgcgaaaattcgtaataagcgagaaaaccataaaaagtatatggtttatttaaggagtctgttttgagtagtgatcatcgaatgctctctctcaccccatgtgcagggcgttgttcaacagtttttggtgatcaggtgtgtcgtggttgtcgccgctttaaccatgaagtaattcaatggaatacctatacggcagagcagcgtttagctgtctggaagcgtttagatgatcaattggatcagattttggtacctatgttgccgcaggcgaatctacagcatgtagaaggatttatattaggtaaacgtgtcaggttaatggaaggggcgagtaaagggcgtaaactctaccatgccttaaaaatatgtgaaaagaataagcatttagctcatgagagtggtttagggatttcagaagcacaagttaaagaagtatggactgagtttgaaagacgtattttagctttggctaaagcaagttatgagttggcttggttaagagctgatggtattagtcatcacttattaaatatgtttgaagaagaataacttttaaaaacttatttataaaaaaaagctgccattaggcagcttttttacattaatgttctttcgaatattaacgcttgatgtcacgttgcacttcaccagtgtaaagctgacgaggacgaccaattttgtaaggaccgctgtgcatttctaaccagtgactgatccagccaactgtacgtgcaagagcgaagataacagtaaacatttctgttgggataccaatcgctttaaggatgataccagagtagaagtctacgttagggtaaagtttacgttcaacaaagtacgggtcgttcaatgcaatacgttcaagttccatagcaagcgctaattgaggatcattgatacctaatgcttcaagaacttcgtcacaagtttgcttcatcactttagcacgtggatcgaagtttttgtaaacgcggtgaccgaagcccataagtttaacttctttgcgtttaactttttccatgaactcagcaacattttcaacgctaccgatttcatcaagcattttaagaactgcttcgttcgcgccaccgtgtgcaggaccccaaagagcagagataccagcagagatacacgcatatgggttcgcaccagtagaaccagcaagtcgaactgtagaagtagacgcgttttgttcgtggtcagcatgaagcgtaaagatacgatccattgcacgagcaagaacagggtttactttgtagtcacggtctgcaggagttgcaaacatcatgtgtaagaagttttccgcgtaatttaagtcattacgtggatagatgaatggctgacctacagtatatttgtagctccaagcagcaagcgttggaattttagcaatcaaacgaatcgcagtaatttcgcggtggttgatgtcttcaatgtcaaggttgttgtgatagaaagcagataatgcgcctactacaccaaccatgattgccatagggtgagcatcacgacggaaaccattgaagaaacggctaacttgatcatgaaccatagtatgagcacgaactttcgcatcgaactcaactttttgttcagcagttggtaactcgccatttaataataaataacaagtttcaaggtagtctgcttgagtcgctaactggtcaatcgggtaaccgcggtgtaataaaatacctttgtcaccatcgataaatgtgattttagactcgcatgaagctgtcgccataaaaccaggatcaaaagtaaagtgacctgaggccaatacatctttaacgtcgattacatcgggacctaatgtgccactgtaaattggtaattcaatttctttgccatcaagatgtaatacggcttttttgccagttgcttcagacattcaatagatctcctgtcctggtgaatgattatctgactcgaaatcctaattttctcatgtgcgaatcagacggtgtcaaaatttgctataagattagtgagtactgaaattttgtcaattatacttatggataaaaaatgacgttcccacagagagttagtcatcaagacccgagcaaaaaaagtcagtaaaatcactgcatcgggatggtatcataagtcaattcaagaagaacgtgcagaaaaaaaatgaagcgtgagtacaattgtaagcaaatttttaaataaaaattaagaatagggtaacgttataaaatgccaatctgattaaaaaaatcataaaactcaggctgtaattttaaattgtgattcaaaaatcgccacattatcactatttgataattccaaaagttgtcttttttttaagtttaattgtttaaaaaatagctcattgaacagtctagaaaaaattaaaactcattttttgtaaaaatagtgatcattgttaacagtcaagtagcactttatttcttttaatataaatacggataaaccctctttataggtaaaactgaataaaattagcaggtaagaagcagttttatttatatttttgtcttgagttgatgatttattaactttatctttagtctaaaatgcacttattttaaataaaactgtagaaaagcaattttttataaaagatgaaattaaacaagcacatgttttgtttaatcttaacttcgggatagggaaggatgctgtttggctatgtgaatgattcttatttgatgagtttttgcggaaaagccaaagtcgattgtttgtattttgatatttcgcgttttataattcagtgtcgtttataggttaggcatgagctgtgcttgcctaacaatgccagctttccttggaattaattcaacaaactccggtcggagtttctacctacaggatgcccgctgtgaaaagcaacagacctgtcaatttgtccatgggtcaggtgttagcggtaaatttacgctcacccgtggctattgcatcaattttacaccgtttatcaggtgtcatcgttttcttattagtaccagttctcttatggattctagataaatcattatcttcaccagaaggatttgactacgttaaaaatgtcgtttttggaaatatcctcgtacgttttgttgtgtgggtatttgtagccggcttgattttccacttcattgctggggttaagcatttgcttgcagatctaggttttgctgaagaactgcaaagcggtcgtattgcagcgacaatttcattgatcttatctgtggtagccattatcgcagcctttgtatggattatgttctaatgaaaagtgctacaggtttaacaggttcaggttctcgtgattggtttatccagcgtgtaagtgctgtggtattggcagcttatactgttgttctttttggttggatcctctgcaaaggcggatttgactatcaacaatgggctggcttcatgatgacattaccaatgaagattttctctttattggcaattttgtcgcttatcgcacacgcatggattggtatgtggcaggtttttactgactatgtcactactcgtcaaatgggtccttcagcgaaaggtttacgccttgtactgactacggctgtcattattgcagtgtttgtgtacgcaatctggggtatccagattttctgggcgaattgataggaagatatcatgggcgcgataaaccctaaagaagattattcaaatattcaaaacctcactttcgatgctgttatcgttggtggtggtggttctggtatgcgtgcatcttaccaacttgctcaagcaggtttgaaagttgcagtacttactaaagttttcccaacacgttcacatacagttgctgctcagggcggtattggtgcgtcgttaggtaacatgcaagaagataactggcatttccacttttacgatacagtaaaaggttctgactggttaggtgaccaagacgcaatcgagtttatgtgtcgtgaggcgccaaaagttgtttatgaacttgaacacttaggtatgccgtttgaccgtaacgctgatggtacaatttaccaacgtccattcggtggtcactctgcaaactatggtgataaaccagttccacgtgcttgtgctgctgctgaccgtactggtcacgctttattgcacacgctttatcaaagcaacgtgaaaatgggtactcaattcttcgttgagtggatcgctcttgatttgatccgtaacgaagcaggtgatgtactcggtgtaactgcaattgaccaagaaactggtaacattgcagtattccaagcaaaagcaacattatttgcaactggtggtgctggtcgtgtttaccgtgcatcaacaaatgcttatatcaacactggtgacggtcttggtatggctgctcgtgctggtattccattacaagatatggaattctggcaattccaccctacaggtgttgcgggcgcaggcgtattgttgactgaaggttgtcgtggtgaaggtgcgatccttcgtaacaaagacggcgaaccattcatggaacgttatgcaccaactttaaaagacttggctccgcgtgacttcgtatcacgttctatggaccaagaaattaaagaaggtcgtggttgtggtccaaaaggtgattatatcttgcttgatatgactcacttgggtgctgacacaattatgaagcgtttaccatctgtatttgagattggtaaaaaattcgcaaacgttgacatcactaaagaaccaattccagtagtaccaacaatccattatcaaatgggtggtattcctacgaatatgcatggtcaagtgtgcttaccagagcctggtacagacaactacactaaacctgtaaaaggtttctatgcaatcggtgagtgttcatgcgtatcagtacatggtgcgaaccgtttaggtactaactcacttcttgacttggttgtatttggtaaggctgctggtgagcacattatcgattacgtaactaaacatcatggtgatgaatatgcgccgcttccaacaaatgtattagagcaaactttagctcgtgtacgtaaattggatgaatcaacttctggcgaaaatgctcaagaagttgctgatgcaattcgtgatatcgttcaagaccacgcaggtgtattccgtactcaagcattgcttgataagggtgttaaagagattcttgctcttgaaccacgcgtgcgtaacatccacttgaaagataaatctaaagtatttaacactgcacgtgttgaagcgcttgaagttgaaaacttatatgaagttgcaaaagctacattaatttcagctgctgcgcgtaaagaatgtcgtggtgcgcatacggtagttgattatgaattaccagctgatcacccaacttattcatacggtcgccgtgatgatgagtggatgaaacatactttatggtattcatcagataaccgtttggaatataagccagtgcgcttcaagccgttaactgttgatccaattccaccagcaccacgtacattctaatcgggagtataaagatgagtagaggtactcgtacattcgaaatctaccgctatgatcctgataaggataaagcgccgtacatgcaaactttcaagcttgaattgactgataagcaccgtatgttgcttgatgcattgcttgctttgaaggttcaagacgaaacgttaacattccgtcgttcttgccgtgaaggtatttgtggttctgatggtgtgaatatcaatggtaaaaatggtttggcttgcttgcaaaaccttaacgatttaccagagaaaatcgtaattcgtccattacctggtttgccggttgttaaagatttggttgttgatatgaaccaattctatgatcagtatgacaaaattcagccattcttgattaataaccaacctgctccacctaaagagcgtttgcaatctcctgaagagcgtgaacacttaaatggtttgtatgagtgtattctttgtgcatgttgttcaacttcatgcccatcattctggtggaaccctgataaattcttgggtccttcagcgttgttgaatgcatatcgttttattatcgactctcgtgatactgcaactgcagaacgtttggctcgtcttgacgatccgttcagtttgttccgttgtaaaggtattatgaactgtgtgtcagtatgtcctaaaggtttgaatccaacaaaagcaatcggtcatatccgtaatatgttgttagatcaagcgggttaattctgcgcaaatagagaacgcacatccttgatgtgcgtttttttttaattttataatacgtgtcttatactttagtcggtaaaagaggggtttttatataaagcaccatatattaatagataaaattggatatgtatttcgccaatttatagatggtatgtgtcaaaaaaatcaatcgttcgttaagaacatgatacgatttgccacaaagttataggtgaaaaaagcgtatactagtgaaattaaattaagtggcacgatcttagatctgtgcttaatttttatggttaaagtcattttagaaaagttaattttaaagttaatttttctaaaaagatttgcaaaaaattgctcggttttttatcgagtataaggtgagtgatgatgccattgagggcgttgtgattcattaattacctatggagttttctctctaggtagtatgacgccccatggtcttgaagacctgttgggtaagtagtgtcatttttaccaatttgacattatgcatcatgggtatgcttaaaaggcagcctgtaatattttttgcaataggaaatgggtccacaaatgcaagaagttgctgacgcattgcgtcttgacactgaactttccgctgatagtgcagcgtatattgaagaactttacgagcagtacctgacttccccaacctccgtcgctgaggactggcgccaatatttcgataaatatccaaagggtgaccaaccacacagcgctgtgcgtgagcaattcctattactaggacgtaatgctaatcgtgttcaacctgttgtacaaagtactgtcagtactgaacatgagcgtcgtcaaattggcgttttacaactcattgctgcttatcgcaatcgcggacatcaaaaagctaagttagatccgttaggtcttgctaagcgtgaagatattcccgatttagatctttcagcacacggtttaaccaaatcagatttagacacagtattcaacacaggcaatcttgagatcggtaaaagcgaagcaacgcttgctgagatgattgaagcaatggaagcaatctattgtggttcgatcggtgttgaatatatgcatatcgtggacacaaaagagaaacgttggattcaacaacgtcttgaaagtgcccgtggtaaattcaatttctcaaatgaacaaaagaaaggcttcttagagcgcttaactgctgctgaaggcttagaaaaatatctcggtaataaatacgtcggcgctaaacgttttggtgttgaaggcggcgaatcttttattcctatggtaaatgagattatccagcgtgctggtgccgtaggttgtaaagaagttgttatcggtatgccacaccgtggtcgtttgaaccttcttgttaatattatgggtaaaaaccctgcggacttatttggtgagttcgaaggtaaagcacttcataagaaaggttctggtgacgttaaataccaccaaggtttctcaagtaatgtaatgactccaggtggtgaagttcacttggcattggcatttaacccatctcacttggaaatcgttggccctgtagttgaaggttctgtacgtgcgcgtcaagtacgtcgtagagacatcggtggtgatgacgtattaccagttattgttcatggtgatgctgcatttgcaggtcagggcgtgaacatggaaaccttccagatgtcacaaactcgtggctatacggttggtggtacagttcatattattgtgaacaaccaagttggtttcacaacttctgatccacgtgatgcgcgttcgacagaatactgtactgacgttgctaaaatgattcaggctcctatcttccatgtaaatggtgatgatcctgaagctgttatctttgctactcaattagcacatgatttccgtcacgaattccgtaaagatgtagtcatcgatttgttctgttaccgtcgtcgcggccataacgaagcagatgagccatctggtacacaaccattgatgtatcaagtgattgcgaagaaagcaactactcgtacactttatgctgatcaattggtacaagaaaaagtacttgaccgtgctgaagctgaccaaatggttgaagattatcgtgctgatttagaagcgggtaatcatgtagcgaatgctttgattcttgagccgaacactaaaatgtttgtagattggactccatatttgggccatgaatatacagacgattgggatacttcatttgacataaatcgccttaaagagttaggcgagggcatgagcaagcttcctgaagggtttgtaatgcagcgtcaggttcaaaaagtaattgaagaccgcgtgaaaatgcaaactggtgaaactccattgaactggggtgcagcagaaactttagcttatgcaactttattagatgaagactatctagttcgtattactggtgaagacgtgggtcgtggtaccttctcacaccgtcatgcgaaattgcataaccaagttgatggttcaacttacattcctctttgccatgtgaaagagaaccaaccgcgttttgcgatttatgactctcttttatctgaagaagcagttcttgcgttcgaatatggttacgcaactacaattcctaagagcttgattatttgggaagcacaatttggtgacttcgtaaactgtgctcaagttgtgattgaccagtttattgcttctggtgagactaagtgggagcgtgtttgtggtttaacaatgttgttaccacacggtttcgaaggtcaaggtccagagcactcttcagctcgtttagaacgtttcttacagttatgtgctgaagacaacatgcaagtgatcactccaacgacacctgcacagattttccatgcattacgtcgtcaggctgtacgcccaattcgtaagccattaatcgtaatgtcaccgaaatctttacttcgtcataaacttgcgacttctactttagaagagctagcacatggttcattccaaactgtaattgacgaaatcgatcaaattaacaagtcagatgtaactcgtcttgtactttgtggcggtaaagtttattacgacttactcgaaaaacgtcgtgaacaaaacttaactaatgttgcaattgtacgtattgaacagttgtatccatacccagagcaacgtcttgcggaaatcttggctgcttatccaaatgtgaaagaactcgtttgggcgcaagaagagccgaagaaccaaggtgcttggttgtttatcgcaccgcgtttatatgacgatatcttaaaatctggcaaacaaatccgtatcagttttgcaggtcgtgaagcttctgctgcaccagcttgtggctcaccgtacttgcatgcaaaacaacaagctcagctaattaatgatgcattggcaatcgaagctgaacaatcaggagattctcaataatggcaaccgaaattaaagcaccggtattcccagagtctgttgcagatggaaccatcgcaacttggcataaaaaggtgggtgaacctgtatcacgtgatgaagtaatctgtgatattgaaaccgacaaagttgttttagaagttgttgctcctgcagatggtagcttggttgcaatcattaaaggtgaaggcgatacagttctttctgacgaagttattgctcaattcgaagctggtgctggcgcagcggctgctgctcctgcggcagtagaacaagcagttgctcagactcaagctggtgctgctcctgttgttgagcgtaatgaaactgtatctgatcaagctcctgcggtacgtaaagcgttaactgaatctggtattgctgcttctgacgtacaaggtactggtcgtggtggtcgtattactaaagaagatgttgcaaaccatcaagctaaaccagctgctaacgttactccattaagcgttgctgttggcgagcgtatcgaaaaacgcgttccaatgactcgtttacgtaaacgtgtagctgagcgtcttcttgcagctactcaagaaacagcaatgttaactacatttaacgaagttaacatgaagccaatcatggaattacgtaagcaatataaagatgctttcgaaaaacgtcatggtgctcgtttaggcttcatgtcattcttcgttaaagcagcaactgaagcgctaaaacgctacccagctgtaaatgcttcaattgatggcgatgatatcgtttatcacggttactatgacatcggtgttgcagtatcttctgatcgtggtcttgttgtaccagtattacgtgatactgaccgtatgagctatgcagaagttgaagcaggtattgctgcttacgctgctaaagcacgtgatggtaaattatctatcgaagaaatgactggcggtactttcacaatcactaacggtggtactttcggttcattactttcaactccaattttgaaccagccgcaaactggtatcttggggatgcataaaatccaagaacgtcctatggcggtaaatggtcaagttgaaatcttgccaatgatgtacttagcgctttcttatgaccaccgtatgatcgatggtaaagaagctgtaggtttcttagtagcaatcaaagaattgttagaagaaccagctaaactcattcttgatctttaatttcttcgaataaatacctatcagggtagagtaatcctctatcctggtttatggagataaaaatgtctcaacaatttgatcttgttgtcattggcggtggtcctggtggttatgaagctgcgattcgcgctgctcaactaggcttcaaagtcgcttgtattgaaaaacgtattcacaacggtaagccttctttaggtggtacttgcttaaacgtaggttgtatcccttctaaagctttgcttgattcttctcatcgttatgaagatacagtgcatcatttagctgatcacggtattacaactggtgaagtgaatttcgatcttgcaaaacttcttgctcgtaaagacaaaattgttgaccaattaactggcggtattgatcaattgcttaaaggcaacggtatcgagtggttaaaaggtacaggtaaattacttgctggtaaaaaagttgagtttgttccacatgaaggtgaaactcaaattttagaacctaaatacgtaatccttgcgtctggttctgtgcctgtaaatattcctgtagctcctgtagatcaagatattattgttgattcaactggcgcattaaacttccctgaagtacctaagcgtttaggtgtaattggtgcaggtgtaatcggtttagaacttggttcagtatggcgtcgtcttggtgctgaagttgttgtatttgaagcaatggatgcattcttgccaatggctgataaagcactttctaaggaatatcaaaaaatcttgactaaacaaggtttagatatccgcattggtgcgaaagtatctggtactgaagtaaacggtcgtgaagtgactgttaaatacactcaaggtggcgaagataaagaacaaacgtttgataagttaatcgtttgtgttggccgtaaagcttatgctgaaggtttattagctgaagattcaggtattaaattaactgagcgtggtttagttgaagtaaatgatcactgtgcaacttctgtagaaggtgtatatgcgattggtgacttagtacgcggtccaatgcttgctcataaagcaatggaagagggcgtaatggctgttgaacgtattcatggtcatgcagctcaagtaaactatgacacaatcatttctgttatctatacacaccctgaagcggcgtgggttggtttaactgaagagcaagctaaagaaaaaggtcatgaagtaaaaactggtcaattcggttttgctgtaaatggtcgtgctttagctgctggtgaaggtgcaggttttgttaagtttgttgctgatgcaaaaactgaccgtttattaggtatgcatgtgattgggcctgcggcatctgatatcgttcaccaaggtatgatcgcacttgaatttgtatcttctgttgaagatcttcagttgatgacttttggtcacccaacattctctgaagttgttcatgaagctgcacttgctgtagatggtcgtgcaattcacgcgattcaacgtaagcgtaaataaaataaagagcggtcctccgctctttttcacattcgatggtgtgattaaaaaatcatcaagttgatagacgtagacagcaatttgcttatacaacatgagaatgttgcgcaaattgaagacaacaaacaaagttaagtaggtaactaaatgaacttacatgagtatcaagctaaagcgttattgaaagaatatggtatgccggtacaagaaggtatcttggcaaccaatgcagacgaagcagttgctgcatttgaacagcttggtggtaaattcgctgtaatgaaggcgcaagttcatgctggtggtcgtggtaaggctggtggcgttaaagttgcaaaatctaaagaagatgttatcgaatttgcaaacaatatcattggtactcgtcttgtaacgtatcaaacagatgcaaatggtcaaccagtaaacagcatcattgttgctgaagacgtatatccagttgagcgtgagctttacttgggcgcggttgtagaccgttctagccgtcgtattactttcatggcttctacagaaggtggtgtagaaatcgagaaagttgcggaagaaactccagaaaaaattatcaaagttgaagttgatccattagttggtttacaaccattccaagcacgtgaagttgcgtttgctttaggtttgaaagacaaacaaatcggtcaattcgtgaaaatcatgacagctgcttatcaagcatttgttgaaaatgatttcgctttatttgaaattaacccactttcagttcgtgaaaatggcgaaattttatgtgtagatgcgaaagtaggtatcgactctaacgcgctttaccgtttacctaaagttgctgctttacgtgataaatctcaagagaatgagcgtgagttaaaagcatctgaatttgatcttaactatgttgctttagaaggtaacatcggttgtatggttaacggtgctggtcttgcaatggcaactatggacatcattaaactttatggtggtcagcctgcaaacttccttgacgttggtggcggcgcaactaaagagcgtgtaatcgaagcgttcaaaatcattcttgctgatacgtctgtacaaggtgttttaatcaacatcttcggtggtatcgtgcgttgtgacatgattgctgaagcaattattgcagcggttcaagaagtaaatgtaactgttccagttgttgttcgtttagaaggtaacaacgctgagttaggtgcgaaattacttgatgaatctggtttgaaattaatttctgcgaacggtttgtctgatgccgcagaaaaagttgtagctgcagttaaagcgtaaggggagtatcaatcatgagcgtattaattaataaagacactaaagtattggtacaaggttttactggtaaaaacggtactttccactctgcacaagctttagactacggtacaaaagttgttggtggtgttactccaggtaaaggtggtacaactcaccttgacttaccagtattcaacacaatgaaagaagctgtacgtgaaacaaatgcagatgcatctgtaatctatgtaccagctccattcgttttagactcaatcgttgaagcggttgattcaggtgttggcctaatcgttgtgatcactgaaggtgttccaacaatcgacatgcttaaagcaaaacgttatttagaaactaacggtaacggtactcgtttagttggtcctaactgcccaggcgtgatcactccgggtgaatgtaagatcggtattatgcctggtcacatccaccaaccaggccgtattggtatcatctcacgttcaggtacattgacttatgaagctgttgctcaaacaactaagcttggtttaggtcagtctacttgtatcggtatcggtggtgacccaatcccaggtatgaaccaaatcgaagctcttcaattgttccaagacgatccagatactgatgcaatcatcatgatcggtgagatcggtggtacagcggaagaagaagctgctgaattcatcaaatctaacgtgactaaacctgtagtaggttacatcgctggtgtaactgcacctaaaggtaagcgtatgggtcacgctggtgcgatcatttctggtggtcaaggtactgctgaagagaaattcgctgcatttgaaaaagcaggtatggcttacactcgtagcccagctgagcttggttcaactatgttgcaagtattaaaagagaaaggtttagcttaattgcttccttgaatctttaaaaaataccgcatctgaaaaatgatgcggtatttttttgtattattgaaaagttaaataaaattgatataaggaataatttggttaaaaaagacaaaaaaatacgcaatgattggggtgatcactgcgtagaacaacgaatctgttaaaaacagtttcggcttaaggagaaatgtcgtgaggttcatatcaacctactcaagttatattagtgacgcattcttatttgttcattaaggttcacgttaattagtgttacttcacgttaaaagggtaaaagcgtgtgaatcataataaatatatagaaattctaaaaaattaaattattgaatttaaatataattataaaaaaagccccgtagggcttttttgatttatatctctaatataaaaattagaacttaaataagcctaagccatctttaacttcgtccaaagtctgctgggtaatgattcgacatttatcagtaccttggcgtaaaacatccataatgtagtcaggatctttagcaagttcttctcgacgttcacgtataggtgtaattaattcttttagtacaccttcaagacgttttttaactgtaccatcaccaagaccaccacggcggtagtgtgcttttagctcttcaacttcttctttatttggatcaaatgcatctaaataagtaaatacaatgtttccttcaacttgacccggatcttcgatgcgaagatgatttggatcggtatacatcgcatttacagcttttttgatgtctttgtcagaagcatttaaaacaatggtattgcctaatgacttagacattttcgctttaccatcaaaaccaggtaaacgagccatattagaaagcaaggctttacattcaggtaaaaggtcttgaccaatttgacggtttacacgacgcacgatttcgttagtttgctcaatcattggaatttgatcttcgcctactggtactacagtcgctttaaaagccgtaatatcagctgcctgtgctacagggtagcaaaggaaaccggcaggaatatcacgttcaaaaccacgcatttgaatttcagatttgatggttgggttacgctccaaacgagctacagttacaaagttaagatataacattgtaagctcattcagtgcaggcaagcatgactgtacacaaattgtggttttagttggatcaatgcctaccgctaaatagtctagagcaacttctaaaatgttacggcgtactttatctgggttatcggcattgtctgttaacgcttgtgcatctgctaataagagatgttgatgatggctatcctgtagacctacacgagaacgcaaagaaccgacaaaatgcccgaggtgaagttgtccggttgggcggtcgcctgtcaaaataattggacgctgatcaacattactcattatttattccactatggtattggcttaatcagggataataagccctgcaatataaaagattggcattattgtacgggaaataaaattttttcgtcagcaattgggtaaacttttcttaaaataatattgtgaatttattcagtaaaattacaaaaattgaaaaaaatcatcttacaatagtttaataaatacaaacctggataagaaatggcaagtggcttacttttactactagatgatattgcaacaattttagatgacgtcgccttaatgagcaaaatggcagcaaaaaaaactgctggtgttttaggtgatgatttggctttaaatgcacaacaggttacaggtgtccgtgctgatcgcgaattaccgattgtgtggaaagttgctaaaggctcctttgttaataagctcattttagttcctctagctttattaatcagtgtgattgctccttggttgattaatcctttattaatgcttggcgggctattcttatgttatgagggtgttgaaaaagttcttcataccattacacataaaaaagcctcaacctcagaagaagcacaaaaagagtttgatagtgaagagttagacttggcaacttttgaaaaagataaagtgaaaggagctattcgtacagactttattttgtcagctgaaattgtggttatttctttaggtactgtggcaactgcaactttaatgactaaagttagtgtcctcagcattattgcagttgtgatgacgatcggcgtttatggtttggtcggcatgattgttaagattgatgacttgggtctatatttaacaaaacaggctgcttcttttaaacaaactattggtcgagggctgcttgcatttgcgccacttttaatgaagttattgtctatcgtcggcactattgcgatgtttttggtaggtggagggattattaatcatacgattcctttactccatcatgtcactgaaaatacagttgaccatgtggaaactatacctgctgtaggcaacatcattggtgctttaaccccaacgcttattaactttgcaataggaattgttgctggtgcaatagtattgcttgttgttagcttgatacaaaaaatgtggccaaaagcttctagttaatcaggccatctacaaagaagagggaaattatgcgttggagagatcgtcgagtcagtaccaatgttgaagaccgtcgaggcggaggcggtgttagggcaggtggtattagtattattggtttggttgtggcatttgttgcatggaaattttttggcgttgacccccaacaagcatatcaggcaacgcagcaggttactgcttcgcaacaatcaaatgcaactgcacccgaaagtttaacagccgagcaaaaggaagcttctgattttgttggaacagtattagccgatacagaggatacgtggacacctatttttaaacagttaggtaaaacttatacgccaccaaaattagtcttgtttagtgggatgattcagtcaggctgtggtacagctcagtctgcaatggggcccttttattgcccagcagatcagaaggtttatatcgatacagaattcttcaaagatatgcgtgagcagatgggaatatctggcgaacaaaatcagacagaattatcgagacaagatcaggcaggggactttgcccaagcttatgtggttgcccatgaagtaggacatcatgttcaaactttgcttggtatctcatctcaagtacaacaggctcgtgcacaagtcagtcaaagagaaggtaatcagttatctgtacgtcaagaattacaagctgactgtttagcgggtatctgggccaatcataatcaacagcgtactcagtttttagagcagggggacgttgaggaggcaatggatgccgcgcaaaaaattggagatgactacttacaaaaacgagcaacaggacaagtcgttccggatagctttactcatggtagtagtgaacagcgaatgcactggttccaagtcggtttaaaaaccggtgatattagccaatgcgatacttttaataattctatctaaatctataaataagatgagtttacaaggtgtttaagtaggctcatctttttaatcatccctccaacataattaatgttaagaaatttaactaattgatagaatgattaacgtaattcgttaaacttgtattccaactttttaattgcttgggcacacatgaggtgcctattttctcgttctgttcagttctgctgtctagattttttatttggtcattgacccagaagaagggtattcatgggtaattttttcttattacaagcatttacggttgtatttgccttatcaattgcgaccaccatatttaataagcgtattttgggctttcctcaggctatcggcgtacctcttgtttctgcgatttttgtcttcattttgcaatggggagccagtcttttaaatggtaatcaattcattactatcaatattcataatattgaggaagcagtacggcacatcgatttctatgattttttaattaatggtgttatttgctttattctgacgtcttcagcacttaaatttaaaatttcagatctaagaagctattggaaacagattagtatcttagccactattgccttggtaatctgcgctgtattgtttggtagcttactttacggtttccaattgttagttggacatcatgtaccaattttggttcttctattattaggtgcagcattgggtgcaacagacccgatcggtattaaaggtgttttaagttcaattcgtgctcctcatcatctcattgttaaattagaaggagaatctttatttaacgatgcgatgtgtattgccttatttatgacattactgaatgttttacagggtgaacatttttcattggttgcgacattagaagctttgctttatgaaattgtggtagctgttggtattgggtgggcatttgggataggtaccttacgcttattgcgtggtaaacacgaaatggaatccctgattttaacaactgcattacttgcaagtggagcatatttggtggctctatttgcccatgcatctgcaccgattgcctgcgtcattggtggtttaatcgtcggtaataaatggaaagaaattcgtgaagagcgtgagatcagagaggttaaccatttttggcatacggtagaaggaattatcaattcattcttatttactttaattggccttgagttatttattcttgacttaaactttagcctgattttaggtggaatagttgctttctttattctgcatatttctcgttttgcagcaaactttatgtcttttgctttcttcccaacaatgcgtaagaccaaaagttacaatggtagtttaactattttatcttgggggggtgttcgaggagggatttcactcgctttaattttggcggtcgcgaatattccggcgctgagtccttatagtagtattctgattggatatacctttattagtgtattgttatctggtgtagtatgtggacttggccttcctgcggtaatgaatgcgttttattacaatcctaatgaagaaacggaagggcttaaaggcttttatcaaaagctatgccataaaatgaatcgccgtggctttcaatatatagttggagaagatgcattaggaagagaaacaattactatctttaacccagatgttattgttgatcaaaaaacagaagacgggattgcaaccatgcatgatccaaataagttacaagaagtaaaacgtttcgaaagtccagataatttctaaaagtaaataaaaaaataatttttatttgaatataaaaatgaggctttagtgtaatagtaaaatattatctaaggccattttttttctatatatatcattattaatatattttattttattgagatattaaaacttgttatataaaaatttaaattaaaataattttcaatgaatgttcaataataagaaactaattttgttttatatataaaacagttaataagcttgttgaataaattataagtagaaaaatcagatttttatttatataaaatttgtattaattaattttttttctttgagtactttagtatttgttttttttattttaaagtgtttaatgtaaaaatgatcacattacttaatgtttttaagttgtaggtcaaaaactcgaaaacattaagtaaaaagaattatacataaaatcatttaaatcaataatataaaaggaatatagatatgcctgagatacaaattattgccaaggataatcataaaaccttggtaaccacagagggaacttctgcaaaactttcagaagcgtcagttgtgttggtgaaagtggctgccagcgatgtattggtagtaaatagggagggtaccaatgcagtcatacgtctgaaaaatggcgagactattgttattgaaggcttctttagtggaacagctgagcctaaagataatagtctggttttccaagatgaaaatggacagttgatttgggcaaaattcaaagatgctgaaaatgatgcagatgctgatagtgatgcggacgcagatgctgacagtgacgtcgaaccacaagcacttttaggtgaagatttaccagcagctctaccagcagaagctccacaagagttggtatctgatgttatttaccagcctatttcttcaattgaacctctactttatcatgatgcaggcgtgaacccatggttatgggctgctattccactagttgcaggcggtattatcgctgcagcatcaaatcatgatagtgatgatgattcttcagcacctgttgataccactccaccaagtaccgatggcgtaactttctcggttgaccctgttacttctgataatgtgattaatgcatcagaagcatccggtaatgtcactattacaggtgttttgaaaaacattccagcagatgcggccaacacggccgttacagttgttattaatggggtaacttataatgcgactgtagataaagcagcaggtacatggacagtaagtgtaccgggcagtggcttagttgcggatgcagataagacgattgatgccaaagtaacgtttacagatgcagcaggtaacagcagcagtgttaacgatacacaaacttatacacttgataccactgcaccaaatacaccagtgattgacccagttaacgggacagacccgattacaggtacagcagaacctggttcaacagtgactgtgacttatccggacggtagtacgaaaactgttgttgcaggaccagatggtacttggactgtgccaaacccaggtttgaatgatggcgatgaagttacagctgtagcaacggaccctgctggcaatacatcaggaccaggaacagctattgttgatgcagttggtccaaatacggatggtgttaattttgctgttgattcggtaacagctgataatgtgattaatgcatcagaagcggctggcaatgtcacgattacaggtatattgaaaaacgttccttcagatgcggctgctacagccgttacaattgttattaatggggtaacttatactgcaactgtagacagtgcagcaggtacatggacagtaagtgtaccaggtagcggtttggttgctgatactgataaaacgattgatgctaaagtaaccttcactgatgcagcaggtaatagcagcacagttaacgatacacaaacttatacactggatacagctgctccttcagcgccagtaattgaccctgttaacgggacagacccgattacaggtactgcagaacctggttcaaccgtaacagtaacctatcctaatggtgacacagcaacagttgtagcaggacctgatggcagctggtcagtaccaaacccaggtttaaatgatggtgacgaagttgaggcaattgctacagatccagcaggcaacccatctttaccaggtacagctattgttgatgcagttggtccaaataccgatggcgttaacttcacggttgattcagtaacagctgacaatgtgattaatgcatcagaagcgtcaggcaacgttactgttacaggcgtattgaaaaatgttccggcagatgcagcaaatacagtggtcactgttgtgatcaatggccagacgtatactgcaactgtagatagcacagcgggcacatggacagtaagcgtaccaggtagtgacttgactgcggatgcagataagacaattgatgccaaagtaacgtttacagatgcagcaggtaatagcagcagtgttaacgatacacaaacttatacacttgataccactgcacctgatgcaccagtaattaacccggttaacgggacagatccaattacaggtactgcagagcctggttcaaccgtaacagtaacctatcctaatggtgacacagcaacagttgtagcaggacctgatggcagctggtcagtatgcaccggtgcttgatccgatcaatgcaacagacccagtgagcggtcaggcagagcctggttcaaccgtgactgtgacttatcctgatggcacaactgcaacagtggtagcaggcacagatggcagctggtcagtaccaaacccaggtaacctggtggatggcgatacagtgactgcaacagcaactgaccctgcaggcaacacttcattgccaggtacaggcacagtttcagcagacatcacagcacctgtggttgcgctggatgacgtgttgacgaatgacagcacaccagcacttactggtacagtgaacgacccgacagccactgtagttgtcaatgtggatggcgttgactatccggcagtgaacaatggtgacggcacctggacgcttgcagacaatacactttccaacactcgcagacggtccacataccattaccgtgactgcaacagatgcagcaggtaacgtaggtaacgatactgcagtggtgacagtggataccactgcaccaggcgtgagcttcacagatgcatctaccaatgacaccactcctgcattgactggtacgattgatgatcctactgcgacagttgtagtgactgtggatggcgtggattacccagcagtgaacaatggtgacggtacctggacgcttgcagacaatacacttccttcattaatcgatggtccgcataccgtaagcgtaactgcaacaatacacttccaacactcgcagacggtccacacaccattaccgtgactgcaacagatgcagcaggtaacgtaggtaacgatactgcagtggtgaccattgatactagtttgccagttgtatctttagatgatttaactactaatgacacgactcctgctttaacaggagctattgatgatccaacagcaaccgttgttgtaaatgttgatggtatcgattatccagcgactaacaatggtgatggtacttggacgctcgcagataatactttgcctgcattaatagatggtccacatacagtggctgtaactgcaactgatccagctggtaatacggctacagatacagctacgcttactattgatacagtccctgcagacctgatcggtgcgatcacgattcctgaagacctaaatggcgacggtatcttgaatgcagacgagttaggcacagacggcagcttcaatgcacaagtggcgttgggaccggatgcgcttgacggcacagtggtgaatgtcaatggtgtgaactacaccgtgactgcagctgaccttgcaaacggctatatcacagcagcgattcctgtgacaggcgaaagccctgtagcgatccatgcagaagcagtggatgcacaaggtaacgtagatgttgcagatgcagacgtgacagtaacggttgatacagttcctgcagacctgatcggtgcgatcacgattcctgaagacctaaatggcgacggtatcttgaatgcagacgagttaggcacagatggcagcttcaatgcacaagtggcgttgggaccggatgcgcttgacggcacagtggtgaatgtcaatggtgtgaactacaccgtgactgcagctgaccttgcaaacggctatatcacagcagcgattcctgtgacaggcgaaggccctgtagcgatccatgcagaagcagtgggatgcacaaggtaacgtagatgttgcagatgcagacgtgacagtaacggttgatacagttcctgcagacctgatcggtgcgatcacgattcctgaagacctaaatggcgacggtatcttgaatgcagacgagttaggtacagatggggcagcttcaatgcacaagtggcgttgggaccagatgcgcttgacggcacagtggtgaatgtcaatggtgtgaactacaccgtgactgcagctgaccttgcaaacggctatatcacagcagcgattcctgtgacaggcgaaggccctgtagcgatccatgcagaagcagtggatgcacaaggtaacgtagatgttgcagatgcagacgtgacagtaacggttgatacagtccctgcagacctgatcggtgcgatcacgattcctgaagacctaaatggcgacggtatcttgaatgcagacgagttaggcacagatggcagcttcaatgcacaagtggcgttgggaccggatgcgcttgacggcacagtggtgaatgtcaatggtgtgaactacaccgtgactgcagctgaccttgcaacggctatatcacagcagcgattcctgtgacaggcgaaggccctgtagcgatccatgcagaagcagtggatgcacaaggtaacgtagatgttgcagatgcagacgtgacagtaacggttgatacagtccctgcagacctgatcggtgcgatcacgattcctgaagacctaaatggcgacggtatcttgaatgcagacgagttaggtacagatcagcttcaatgcacaaagtggcattaggaccggatgcagttgatggcacagtggtgaatgttaacggtactaactacaccgtgacagcactgaccttgcaaacggctatatcacagcaactctggatgcaacagcagccgatcctgtgactggtcagattgtgatccatgcagaagcagtgatgcacaaggtaacgtagatgttgctgacgcagatgtaaccttaaccattgatacaactccacaagacctgattacagcaattacggttcctgaagacctaaatggcgacggtatcttgaatgctgcagaacttggtacagatggcagcttcaatgcacaagtggcattaggaccggatgcagttgatggcacagtggtgaatgttaacggtactaactacaccgtgacagcgctgaccttgcaaacggctatatcacagcaactctggatgcaacagcagccgatcctgtgactggtcagattgtgatccatgcagaagcagtggatgcacaaggtaacgtagatgttgctgatgcagatgtaaccttaaccattgatacaactccacaagacctgattacagcaattacggttcctgaagacttaaatggcgacggtatcctgaatgctgcagaacttggtacagacggtacattcaatgcacaagtggcattaggaccggatgcagttgatggcacagtggtgaatgttaacggtactaactacaccgtgacagcagctgatattaccaacggctacatcaccgcaattcttgctgcaacagcagccgatcctgtgactggtcagatagtgattcatgctgaggctgtagacgcacaaggtaacgtagatgttgctgatgcagatgtaaccttaaccattgatacaactccacaagacctgattacagcaattacggttcctgaagacttaaatggcgacggtatcctgaatgctgcagaacttggtacagacggtacattcaatgcacaagtggcattaggaccggatgcaatcgatggcacagtggtgaatgttaacggtactaactacaccgtgacagcagctgatattaccaacggctacatcaccgcaattcttgctgcaacagcagccgatcctgtgactggtcagattgtgatccatgctgaggctgtagatgcgcaaggtaacgtagatgttgctgatgcagatgtaacagtaacactcgatgtcactccacctgatatcactacaacagtattagcaattgaccctgttaccgcagacaatattcttgatgcgacagaagctggtggaacagtaactttaactggtacattgaccaacgttcctgcagatgcaacaaccacaggtgtagtggtgactataaatggtaatgactacacagcaacagtagatgctatagcgggtacttggacagttaatgttgcgggcaatgaccttgctctagatccagacttaactgttgatgctaaagcgactttcacagatctcgctggaaacagtagtactctacaagatacacaaacttatactcttgcaggttctatcactgcctttgacaacactgatcatgcagttcttagtccgaaaccagcgcttgttggtgatgatgtaagtctaggtagtacttcttatttagtacttacatctgtagcaggcttagaccttcaacttggtggtaattctctaggatttactgtcgatgctggccatgaaggtgatgttactttccaatatagtggcttaatcgacgcagctgtactttctgattacaagttagtagttcagaagttcaatacaacaactaaccaatgggaatctatacatggtgatgctaattcatcattaattagcttgcacttgttaggtattggtacaggaaatgttcctggtgcagtccttgatggtttagatgcgggtcaataccgtgccttcttagcctacgacggactgttaggattgggcgtgttaggcactctttctgccactatggatgattatgatttgtctgtagcaggtggatatgaaattggtaatgctgaaggtaacgtgattactgatccagatccaacaacaggtcaagtcgatcaggtaactgcaaatacttatgtttcatcagtgaatggtcatccgattgatgctgatggagagacatttgcaggtacttacggaacaattactttctatcaagatggtagttatgtgtatgtaccaaatgcagatggttctggtgtaggtcaaactgatgtattcacatatacgttaactgactcagtaactggagcaacaggtcaagctaatcttaatatcgtgtttgattcgattcgtgcagcggataaccttgttgaggttgaactcaatccacaatatcaattggtgggtacagagactgattcagcattctatggcgttctattgaatgttggaaatattgttgacctacaactcctcacagtagatacggttgactttactatcggtgctggtcaggaaggggttgcaacatttaacttcaatagcttgattggtgcatctgctttaggtgactacaatgttgtgttgcaaaaatacaatgatgtgacaggacaatgggaagcagtgaatggtacaggtgatcgttcattactgaacttgaccttgcttggtaatacgccaactgcgcaaataggcgggcttacagagggtgaatatagagcattcttatcattcaatggcttggtaggcggagcagtagctgtaacattaaacggcagtgtagatgtctataacccagcggttattactggttacgatgtcgtagcagctcatggcaacctaatctctgatccaaatacgaatggtgatgttgatatcgctacacctaacagtattatcagtgaagtcaatggtgttgcagtaagtgcatctccaactgagattattggtactcacggtactttactcatctatgcaaatggtgattatacctatacgccaaatgctgatagtgctggattaggtcaggttgatcaatttacttataccttgttagacccagcttctaatataacttcacaagctacgttctatgtacatctagatagtaaagttgtggatatgaattgggatgcagctgatccatcacaacctgctactgtaacgattacagcagtggatgacgctgtaaatgctgcaattgctgctgagcctcatctcatcgaagatgacagagcattgggtagtgcaacttatcttgcattgttatcgttggctggcatcaacctacaagctcctttaccattcgtgaatagtactgtggagttcaatgtaggtgctggtgaaactggaaccgcaacctttaaatacagcagtttaattaatgaaggagcactcggtgattaccaacttgtagtacagaaattcaatactgctacaaatcgttgggaatcaattaccggtagcagtgaagcttctttactgaacttaagtgtattgggtataggtgtgaatgcgacaccgggagtggttgttgaagggcttgacgaaggtcaataccgtgcctttatgacatacaacggcctctatggtaagagtatcctaggtacattgtcaggtacgatggatgtttacgatccaaaccaaattgactttactggtttggcatctgaaggcaatgtcattactggtcttggcgtaggtacaaatgctgatgctgtaactggatacacaattgttgattcagttactgtaaacggtgtgactacgaatgttgatccaaatactggaacaattattcagggtcaatacggtacgcttcaaatattcgcgaatggtgattacatctatacgccgaataatacgaatgccaacctcggtctagtcgatcacttcacttatacgttggctgatcctttgggcggcaatataagtgcaagtctagacttcactattggcaacagtacgccagtgattgccgtagacgaccttgctgtagctgttgttaatccagaatatctgcaaattggtaacgatgttgcggtagatagctacctatatgtggcgttattaagcttaactgacaattttgacttccagttgggtggacaaggtgttgactttactttgaccgatagcaccttaaatgatgtgaccttcaattacagtgcattaatagatgcaagtctgcttgctgattatgtactcgtggttcagaaatttgatactgcaaccaatcaatgggtagctgtaaatggcactggagaagcggacttactcagtctggcagcctttggtggaaattcagtgacattggaaggtctagctgctggtcaatatagagcctatatgacttatgctggtagtggtgttggcgttagcttattaggtacattgtcagttcagaaagatgtatttgatgcgacaaatatcacaggttatagcactcaagttgcagaaggtaatgttattcatgatgtcggcttaaatggacacgcagatactgcttctggttttagcacagtaactagcgttgaatttaacggcacagcatttgctgttaatgcgacaggtgtcacaaccattgtcggtgaccacggtacattgtcaatttatgctaatggtaactacagctatcagccaaatggtgaggctgcaagccttggtcaagttgatcaatttacttacaccttgtcagatggtctaaatacatcgcaagcgaccttgtatctccatattgatagcgatgcagtcgatatgacttggaatacaagtgatccatcacaacctgctgtcatcacagttactcctgtagacgcgattgataacgttgtttctgctggtgtagatatcgttcctcaaggcgagcttggtgtagctgtaggttctgcaacttatctagcattggtgggcattacagaggacttaaatgtttccttgttaggaacaccaagtgttgcatttacaattgatgctggacacgaagctgatgtgacattcgcatatgctccagtgctttcattatcattgtttaatgactataaagttgtattacagcaaaaaggtgctgatggtgcttggcataatattgacggcggctcaagtactggcttactcaatattggtttactaggtaacggtggaattggtgttactgttccagatctaggccaaggtgaataccgtgcatttatggtttacaccggtttaggagtaggtatcctaggtacaatgagtgtagtgaaagatgactttgattacacagttgcgcctaccaatacagcggttgttgcagatggtaatgtattgactgatgacgtaactacgttaactactcaagttaccactgtgacatctgaagtagtgggtgctctaccacaaactgtcggaacagatacagttataaacggtgcatacggtacattggtgatttctacaaatggtcactacacctatacaccaaatacaactgatctgagcgcgattggtaaagtggattcattcacttatacaattcgtgatgtattaacaggggcaacagatacagcgacattacatgttcaggttggttcaccagacgtaacgatcgcatgggatgctgctaacccagcaaatgatggcgtagtacaattaactgctaatcctgatcatgtggttacaactacagacttctcaaatgctgctgatctaccagtagatgtggcgagccctgtggtttctgtaaacctcatcggttctaattcagtagtgtctgatcagtttgtagtaggagctggaactgttgctaatattgatctatcagcggtttatacagcacaacctttagcaagtgtactaccgacagtaagttatgtgatccaaagctggaatggtacagcatgggtgaatacaatttactcaggttctcaaactgctctaggaagtgtggcaactattcaagcgggtagtgttgcattccaagacactgttgagcatttagctgcaggtacctaccgcgtacaatatacgctaacaggtgtttcacttggtgcgacttcactagatacaaatgtttctacaacgacagttcatctagatacttatcgttcagattggatcagcggaaatgtgttggcaggagacaacattggtggagtagcggatacaggcatcttgtctcatgaaggagctaaactccaagtttgggataatgcacaaaatgcttatgttgatgcagttggacaaacaatcaataccggtaacggtgtattgattatgcaatcaaatggtgaatatgagtaccgtccaaatgatgtgactacaaccacacaattggcgtctactgacagtattaactataagattgtgtccgtaactggtggagttgaatctcaatcaaccttaacgattgatttaacacatactgattacaatcttctttacacaagtacttctgcgaatgacacattcacaacaggtacgggttcagatactgtgatttatcaattgttgaatggaactgctgctacagctaacaatggtgcaaatacaggtggtaacggtgtagatacttggactgacttccatgttggtaatgttgctacagacaaacaagctgatctgattgatatcagagccttgttagatggagatcaaacagatgctaatattggacaatatctgaatgtcactacaagtggtggtaacactacaattcagattgaccgtgatggattatcaggactcatcccaggtaataacttcactacattgttagtcttacaaggtgttactacaacagagactgaattacttaacaatggtcaaattctctattaatagataattgaatcatcagaaaaagagaaccctagggttctctttttttatttttaaacaatactttaacctagctttgaaagagttcatgctatgatgcattgagaattttatagaacaacaaataacggatagggacttaattcgagtggcggtatttttagacttcaaaagacagctcaagctttggttagaacatattgttcaccatgtttcagaccttcaagaagaaactattttatttatatcatttggccctaaagatcacagatgtagcgtatggcatagtgaaaaaacagtgcttacacaagcaactctacaattatttgattttattgatgatcagttttcgccagatcaacttccagactacataaaaattgatgttgcgtacaatttagaaaagcaaagttggaaccaaatagagcagcaggttcatcaccaatttcacaataatcattaccgcagaggtattggatttgatgattcctgttcgttagcttttctggagcaagaaatatatggaaaagccattattcggggcttaagttatgacaagccgaacttttttgatgaaacaaatctgaactatgcaattaaacaaaaatatcgtgcaacaaagccggaaattaaacttaagtcactacaagaagtgtggactttcgatacctatgcaactttttatgaaaatggacaatttattaatttagcgagtcgctacgatgcaaatggtattagagccattgctagcaataaaaaacagcactttagagacctcattgaaaaaaatgcagcgtttttacatagccagattcaagaaaatggcaaattcatttatggatattttcctgcttatgatcgtgatatacggaactataatacggtacgtcactgtacttcgctttacgcgcttttagagacttttgaagtacaagataaacctgaatattggcctaaaattgttgcagcaattcaatacgcacttactactttctataaagaaaaagacccaataactgcgtttatgattgatggtaaagaaggggagctagaaattaaattaggtgcaaatgccgcagctattttaatgttaacgaaatatcaagaaatcacaggaaaagatgattatttaaaatatgcagagaaacttgctcatggtattttagaattagtggatccggatggattaactactcatgtattaaattatccaaattatgatttaaaagaaaagttcagaatcatttattatgatggagaagcagcattagctttattaaggttatatcaaattaatcaggataaaagattattagacacagttaagttaatgtttgaaaattttattcataaaagatatgaaaaatatcatgatcactggttaagttattgtaccaatgagcttacaaaaatatgccctgaagaaaaatattttatttttggtttaaataattatttaaaacattttatttttattcgaaatagaaaaacaacatatgccactttattagaaatgctaatggcagcctataaaatggtaaatcgtttaaaagagcaaggccataatgcactttttgaacaagcatatatgtctgagttaaaaaaactcattacatttcgagccgaatttcaaaccacaggttttttctatccagaaatagccatgtatatggctcgaccagataaaatattgcatgctttttatgtacggcatgatcgctttagagtaagaattgatgatcaggaacacaacctttctggttatattgcctacgtaaaagatttcgaaggaggggagatatgacttaccctctatttgaaattaagctgctaaccgctcttgatcatgctcaatttgaagaggcaatttgggcatttgaaattgatggagacatttctacattattactgattgattatgcattagaacaattccatcaaaaaaaagttcaagctgatgaagtctatcgggttcctgaacaaaaaattaagaaaattggtgaacaaaatttaggtctagaaaaaaatgaatcatatacatttgctgagctcttacaattcttaatttttactcaggcaaatgatgttaaagatgccttaagcaatatgctgtttggctctattgagcaaacacaattaatcttgtttaaaagagcagaagattaccagttagctttaagagcacctaatcaattaaaaaatctatttttgttggtaaaacacatttatagctatccagccgagctgaaaaaacttttctttattagaacactttcttttaaaaataaagtatatcaaccgattacgcctttgcttgctcatccggtactcacttcggttttatatatctcacatacctttagacagatttatatcacttattccgaacataaccggagcattggttttttctcttttctggatgatattcaccgtctggagcatatggttccttactaccattattttcaagaagggcatgtcgaggccaaaaaatattcttctcaaacaggcattatcaatattcttggagatacctattttggtgaaatgtataccgaaaagcgtaagtctagagggcaaacagatgccttacagcaatatgggtatcattattcatttgaaaaaatacagccctttttaggtaaaaatgacatcaacatcgctaactttgaagcagtattttctttagaaaatcaatcgccgttaaaagataaaaagccatttgttctaaaagcagatgctaaaaaaacattagaagaatttaagagtattcatctaaattatttggttttagcaaataaccatttgaaagattacggtgagcaaggattagcctatacattacatcagttggatcaggcgagtatttcttatattggcgctggactgaaccaaaaagatgctcacaattactttgaaatcacttttgagactaagcactatgcgatttttaatggttattggcatagagacacggcttatctggattatgacttttatgcgttaggatcaagaagtggagtagcttgcttaaatggcgttttacttgaacaaataatgcgttataagcaggctcatccagaacgcaaaattattgttatttgtcattggggtgtcgactttaagcctattacaaaagaccaaactaaactcgcgactattcttactcaagcaggagcggatctgatcgttggtcatggtgctcatactattcaaccaatccagatcatcaatcaaaagcctgttgtttttaatataggcaatgcagtctttaatagtgacggtgaatatgaacagcaaaatgctttgccatttggctgtatagctagacttgatttagcaaaagatatcattcgcctttaccccatttacaccaataatttacaaacattttggcagccttatcctgtagatgctgaagacttctcaaaggccagtatttatatgacatctttactgacccctgagaattacatggcatcccaagataaattagggagatatcttgaagttaaattttaaggatattggttgtaagtcgataaaatggtttgcagttgtactggagtaaaccctaaatttcttaagccaccactgcctaatttacattcggcacttgtcataatattggttggagtacgttttgtagccttcggtgcacaaacatgttttagaccaaatacatgccccatctcatgcacactaccagcctgaatattataatttagacggttccaatctaataaaataaaaggtttgccattattacgaaatgctctgcttgttacatcttcaaatttccattttgttgagtaggcatcataaataaagacaatgacttctttacttgcagtgcgcttaggaaaacatgtatttacactggcaggaatagtttcagtagaaatgggataaggctgattaatttgctgtttcaaatcacaatgtaactttgagaactcttcataagggatataacggtgtaatttaaatttgaaaatcttattatttttatcatctacataatatttatttaaaatcttaatttccttacgcatttgttgataattatcaaattttgtagcctgaggagtattggtagtaaaaacaaaagtgacgggaacaataggccgaccatctgcagatatacttggacctctttctgaaagcagagggggacgagtagtacaagaaacacacagtaaagttccactgatcaacagcaatatttttttcatgcgattttcccttgagctcatcttagagtaggtttaattttattcaaaaatttttatatgatatgaataatgtcaacgtttatggattccattttgacaactcagtatgaactacatcgacaaattttagaagtcatcgctttgattccatatggaaaagttgcaacttatggccaagttgctcgtatggcaggtttacctaaacatgccagattagttgggtatgtgcttaaacatcttgaggcagatcatcaggtcccttggcaccgtgttattaattcgcaaggtaaaattagcctaagtaagtttaatgaaaagggcgaaaatattcagcagttaaagcttgaaacagagggaatctatttattaaatggcaaagtaaacttaaagcaatttgcttggcagccttaaaagtattttaataattgcctgccttgctgtattaagctagacaggctttttagttttaacgaactattaaaaccgggatatgactttcacctaagaccttttgcgcaacacttcctaatacaagttttcgtacacctgtgcggccatgagaacccatcacaatcagatcagcattaagctcttgtgcagcttgaataatttcttcgtgaacaacaaaaccttcaagtaatttggtttctacactaagtccttcttgcaaaaattgttgcttagcttgctctaaaatatctagcaaatatgttctagtacgctcaatcaattcattggtttgccccgtcttaacgtaaaggtcagcaataatcgggtcaagtgccataacttgtacaaccgtaattttactgtttaatgctttcccaattttgattgcttccttcatagcaaccatagaagtttcagaaccgtcaattggtacaagaatatgttgatataacatgagtttattccttattgtaatgatggttatttattcaatactttatacttcttttcttacgatttaaattcgagcacgtaatcatttgtgttttttaagcaagaaattcttgcaaatatattttattcgctctgtaattttttaagatgtgctgttaatgcatctatatcatccgtttgtaaatattcccgcatttttaaaacttgtttttcatctaaatcataaatttttaaagcaagtagtttttctatttgctcctgaggaaaacggtatttaataatttttgcaggtacgccaccaacaattgtataaggggggacatctttagtgaccacagctccagttgcaacaacagcaccttcaccgatttttacaccttgcataatcattgcacgacttccaatccagcagccatctgcaattatagtgtcaccagcggctaaaaaacttcgggtgtcaaaggggaatgtcgatatccagtctggccgatgaagttggttaccacccatcataatcacgcattcagcgccaaaacaaacaaaattaccaatatagagctgatcaattggcttgtctggagtagaaggcttgtcatgtagatatcgcactacacagcgttcaaaaccttgatcccaatatgccgagtagtaagagtaattccctttaatatggatatttggatttttcacagttttggaaataaactcaaattcacaccaatggcggactggtgtgttaattagaggagtatccataatttattatccaaacaaaaatgagccaaaccatattaaataaaaacccctcataaagaggggttcaagtgtattaccttagaggtattctacacttacaacttcgtattccacttcgccttgaggagtggtaatttttacttcatcaccttcatttttacccaaaaggccacgtgcaattggcgaatttactgaaattttattgattttaaaatcagcttcatcatcaccaacaatcttataagtcttgcgttcttcagtatcaaggttttcaatcgttaccgtaacaccgaatacaacacgaccgttttgttctaagtctttaacatcgatgacttgtgcagcacccaatttcccttcgatatcttggatacggccttcacagaaaccttgctgttcacgagcagcatgatattctgcattttcttttaagtccccatgttcacgtgcttcagcaatcgcttgagtaatacgtggacgttcaacagttttcagatgttgtaattctttctctaaggcgattttaccttcaggggtcattggataacgttgcatttcggtccctcttaagttgagaaaacacagttaaaaaaatgaaaaaatcccgccaccgataaggtggcgggacttatcggaaaaaaattaacctacagttaaatcttgcaagcggtatacatccattggcaatttcacagcaaaggcttggcaaaccgcttctgcgccattgatagtcgttgtgtaatacactttgccttgtagggcagcacgacgaatcattgcagagtcatattgagcttgtttgccttcagtagtattgacaataaggtgtatttcaccatttttcaagcggtcaacaatatgtggacggccttcagttactttatttacagattcacattctaaacctgcttctttaagtacctgatatgttccacctgttgctacaagtttgaagccatattcaactaatttcttagcaatatcagcgatgtatttcttgtctgactcacgaacagataagaaagcatgctttacttcaccttcagttggcaagcctggtaagcggtcatttgagcctaaaacagccttatagaatgcttcaccaaaggtttgaccaacacccattacttcacctgtagatttcatctcagggccaagcattgggtctacgccagggaattttgcaaatgggaatactgcttcttttactgcgaaacgatttggaataatttctttagtaaaaccttgagactcaagtgattgacccgccatacaacgagcagctacttttgctaaagattcaccaatacatttcgatacgaatggaacagtacgtgatgcacgtgggtttacttcaagaacgtaaatatcgttgcctttcactgcgaactgaacgttcattaaaccaactacaccaagttcttttgccatcgcaattgtttgacgacgcatctcatcctgaatctctttagaaagagagtaaggagggatagaacatgcagagtcacctgagtgaatacctgcttgttcgatgtgttgcataataccgccaatcacgacatctttaccgtcagatacgcagtcaacatcaacttcagttgcgtcatcaaggaagtggtcaagaagaacaggtgcttcattagaagcctgtactgcttcacgaagataacgtttaagctcatcttcgttatagacgatttccattgcacggccacctaatacataagatgggcgaacaactaatggatagccaactttcgcagcttcagaaataccttcttcagcagattttacaatgctgttgtttggttgacgaagctgtaaacgttgaatcatttgttggaaacgttcacggtcttctgcacggtcaattgcatctggagatgtaccgataattggagtaccagcttcttctaaagcacgtgccaatttaagtggagtttgaccaccatactgtacgattacgcctttaggcttctctgtacgtacgatttcaagtacatcttcaagtgttacaggttcgaagtatagacgatcagatgtgtcatagtcggtagaaacagtttcagggttacagttcaccatgattgtttcataaccgtcttcacgcattgctaaagcagcgtgtacacagcagtagtcaaattcgataccttgaccaatacggtttggaccaccaccaataaccatgatcttgtcacgatttgatgggttagcttcacactcttcatcgtaagtcgagtacatatatgctgtaccagattcaaactcggcagcacatgtatcaacacgtttgtaaacagggtaaacacccaagttccaacgttgcttacggaattgcttttgagaaatacccatgaggttcgcaatacgaaggtcagataaacctttacgtttgaacgaacggatattttcagcagtgagatcaccaaaacctaaagtttttacttgagcttctgtgttgacaatatcttgaatttggatcaagaaccaacggtcaattttagttgcttcaaatacatcatctaaagagaagccgtgacggaatgcatctgctacgtaccaaatacgttcaggtcccggaactttaagctcttttagaatagtttcttttacatttgttgcaccagcttcgactttctcatcgaaaccgcttacgccaacttcaagaccacgtaatgctttttgtacagattcctggaagttacgaccaatagccatgacttcaccaacagatttcatctgagtggttaatacaggttctgcttgtgggaatttctcgaagttaaaacgaggaatctttgttacaacgtagtcaattgatggttcaaagcttgcaggagttacgccaccagtgatgtcatttttcaattcatcaagggtgtaaccaacagcaagtttggctgcgatttttgcaattgggaaaccagttgctttagacgcaagcgcagaagaacgagatacacgtgggttcatctcgatcacaaccatacggccgtctttcgggttaataccgaactgaacgttagaaccacctgtctcaacaccaatttcacgaagaactgcaactgaagcattacgcatcaattgatattctttgtcagttaaggtttgagccggtgctacagtgattgagtcacctgtgtgaacgcccattgggtcgaagttttcgatcgcacatacgataatacagttgtcgtttttgtcacgaacaacttccatttcgtattctttccagccaattaaagattcatcgatcaataattggtgagtaggagagaggtcgaaaccacgttcacaaatctctaggaattcttcgcggttatatgcaataccaccgcctgaaccacccatagtgaatgacggacggataattactgggaaaccaaagcgagattgaatttccaatgcttcttccattgtttcagcaatggcagcttttggacattccaagccgattttgcgcattgcttcatcaaacaatttacggtcttcagctttttcaattgcttcttttgttgcaccaataagttctacgccgtatttttctaatacgccattttcatcaagtgcaagtgcgcagttaagagcagtttgtccacccatagtagggagtactgcatctgggcgctctttttcaatgatttgagcaacagtttgccaagtaattggctcaatataagttgcatcagccattgaagggtcagtcataatggttgctgggttagagttaaccaaaataacacgatagccttcttcacgaagtgctttacatgcttgagcaccagaatagtcaaactcacaagcttgaccaatgacaattggaccagcaccaataattaagatgcttttaatatccgtacgtttaggcattattcgctccttaattactgtttagatgcttcaataagttcgatgaaatgatcgaacaaaggtgcacagtcatgtggacctgggcttgcttcagggtgaccttggaagctgaaagctggtttgtctgtacgatgaatcccttgtagagtgccatcgaacaatgatttatgcgttgcttttaagttagccggtaatgtttctgcatctacagcaaaaccatggttttgagatgtaatcatcactgtaccatcttcaagattttgtacagggtggttcgcaccgtggtgaccatgattcatttttacagtttttgcaccagaagcgagtgccaagatttgatgtcctaaacagataccaaatacaggtaatgttgtggtttcaacaatagtttttacagcttcgatagcgtaatcacaagcagctgggtcgccagggccgtttgaaaggaatacgccatccggattaagtgctaatactttttcagccggagtttcagcagggacaacagtgagtttacaaccgcggtctgcaagcatacgcaagatgttggttttgacaccataatcgtatgcaaccacatggtattttaactcaggttgagtaaagcctttacctaatacccacgaaccttcagaccattcaaagcctgtcgggtcacagcactcttttgcaaggtctaaaccatttaaaccaccaaaagcgcgagctttagcaatagcttcttcttcagtaatattttcgccggcaaggatgcaaccattttgtgcacctttatcacgtaaaatacgagtaagtttacgtgtgtcaatatcagcaattgcgacaacattgtgcgcttgcaaatattcacttaatgattgctcagaacggaagttgctgtgtaatagtggaaggtcacgaataattaaaccattcgcccatactttatggatacgaccagattcaacgtcttcttcgttgcaaccagtgttaccaatatgagggtaagttaatgtcacaatttgttgtgcataacttgggtcagtcaaaatttcttgatagcctgtcatggctgtgttaaaaacgacttctccagtcgtacttcccgttgcgccgattgacgttcctttaaagatcgttccatctgcgagggctaaaatggcgggggtgctcaaaccaaagctcctgaatttcggctgtaaaaaagcgagtagacctaaaaaagataggcgatgttctaaaaaaacatgcccctcctcactggtctgctcgcttgtaacttaacagcgcattatacgcatggaaccttaaaaagtctatttattttctattaaaaaatttaattcattgcttgcttttagcaaaaaaattcatccacttgtctgaaattgatacttttagcaaattgtctgacaatctggctgctgaaattgtctaattcctcttattgtaatgttagctaaaaaataaacaatacgaggaaatagcatgagcgataaccaagtttcaaaagacatagctgagaatacttcatcagtagcagagactgtaaaaacagaagtagctgaagctaaagaggccgtagccaaaacgacgactcgagctaaaaaagcggttagcactaaagctacacaggtaaaagaagttgtagctgaaaaaacagaacaggtcaaagaagtcgctcacgaagcgacttcgcaagttaaagaagctattgcagaaacacaagagcaagtaaaagctgtaattaatgagaccgaagaaaagattgaagctgaaacacaagaattgaatcagaacattcacaatcaatttgctcagattaaacaagatattttacagcgtcttgatgtgattaaagctcagttcaatacttcacaagaaggattgaatgaattaaaaaatactttaaaagctgaaatcaatgcattaattgaagatctaaccaaagtgactaaggaacttaaaggtgacattagccaaatttctttaaaacacaaagactctttaactgaaagcttaaaacgcactaaaaataatgcggttgaagcttggaacaaagcaagagatcactaaagatttagcattaaaagttaataaaaaaagcgagaattaatttctcgcttttttgttttttaaaactcatgcagccaatcacgtttattgtgaaaatcagcatgttttccactatgctgcattgcatagtactgcataccatcttttgtttttaaaacagcagtcaaacctagataaaggtttgcccattttaagcggtgctgttgcataaactggcttaagtcaagacttacatttaacccatagtgggtacgtttgagatgattcaattcgatatcgtaagcaacgaggggaggcatgctttccggatagcgatattcttcaaactggtaagtctgccatgcttgagaaggggaaagattaatttcccggtagaaatcttcatcatgcacgccaatgaaaatttcaaaacaagtctcttcccacaaaaagtcctggcgaggatgagctgcgacttcttggggccagataattagttggtttggatcacgaatccaaaaacccacatttaatgtatatggggcttgctgttcaattgcgccaacaacagaaacagcatgaaaacgatcaaaagctgaaagttcgtaacttgccataagtagtcaataagttagtttgctaagtgtgcgtgacgaacaaggttagataaatgttgattttgcttagctgcttttttatagagtaaaacaattttaccaattttctgtacagcttcagcaccagttgcttctacaatcgcatcaattactgcggcacgagcttcacggtcttcaccagcaatttttaccttgatgagttcatgatcgtttaaagcacggagcgtttcttcaataacagcgtctgttaagccttgtccaccaatcatgacaactggattaagcacatgaccaatttgacgtaaacgtttacgttcatgaatagataaagcggccattaaaaatacctgattttaaaaacgacttagtatagcaaaaaacttaaaatcaaatgtacgaaaaactgtataaataatcgatcaacattattggaaaaaaactgtaaaagttattgagattacgttacatccgtactgtaatgagagtaattttcacgtacaatgagcaatcagaagtttttttgatatttagtgagttatggcaacacgcatcaccaaccaaaaattgtctaaaagtagtcgtgcgtggatgagggaacatctagacgatccttttgtaaaaaaagcacaaaaggaaggatatcgtgcacgagcagcgtataaacttcttgaaattcaagaaaaatataagttgatcaagccaggcatgacagtggtggacttgggagcagctcctgggagttggtcacaaatcgctgggaaactcgttggtagtaaaggattggttattgcttccgatattttacctatggatgctttgccagatgtcactttcttacaaggcgacttcagagaagaagctgtatttgaaaaattgttaaatattttaaacggaagacaagtagacattgtaatttctgatatggcccccaatacatcaggtaatagggctgttgatcaacctcgacagatttacttgtgtgaacttgctttagactttgctcagaaagtcttgggtccaaatggacagtttgttgttaaagtgttccaaggcgcaggatttgatgagtttcgtaaacaagtcgttgatagttttgatgtgttaaaaacagcaaaaccagcagcttctcgggcacgatctaaagaagtttttttggttggacaagggcgtaagaaagcattgcaataaagtttacttgccaagctcctaaaaattgtgcattttgtatcttttaggttatccgcaagcaagacaattgctgtttttaagacgatcggccaagtttgggcatgatcaaattagattgatatgggaataaagctttgagcgattacttcaagaatgccgtattgtggctaataatacttggtgttctgattttaattttcagtaatatcagtgaccgcaataagccaactgcaatgaaatattcagattttgttgcagcggtgaatgctggccaaattaagcaagtcacgattgacggtttaaatattagtggtgaaaaaactaacggatctcagtttgaaactgttcgtccgcaggttgaagacactgaacttatgccaagcttaaacaagcaaaatgttgttgtagagggcacagcaccacaacgtcaaggcattttgatgcaacttctcattgctagtttccctgtactgttaatcattttgttattcatgttctttatgcgtaacatgggtggtggtgcaggcggcaaaaatggtccgatgagttttggtaagtcgaaggcaaaaatgctttctgaagaccaaatcaaagtgacttttgctgacgttgccggttgtgatgaagcgaaacaagaagttgtggaaattgtagatttcttaaaagatcctgcaaaattcaaacgcttgggcgctactattccacgtggcgtgcttatggttggtcctccaggtactggtaaaacgttattagccaaagcaattgctggtgaagcaaaagttccattctttagcatttctggttctgactttgttgagatgtttgtgggtgtgggtgcgtcccgtgtccgtgatatgtttgaacaagcaaaacgtcatgcgccatgtattatctttattgatgagattgacgcagtaggtcgtcaccgtggttcaggtacaggtggtggtcatgatgaacgtgagcaaaccttaaaccaaatgctcgtagagatggacggttttgaaggtaatgaaggcgtaatcgttattgctgcgactaaccgtgttgacgtattagataaagcattgttacgtccaggccgcttcgaccgtcaagttatggttggtttacctgacatccgtggtcgtgaacaaattctgaatgtacatttgaaaaaattgccttcagttactggtgtagatgttaaagttttatctcgtggtacacctggtttctctggtgctcagttggcaaaccttgtaaatgaagctgctttgtttgctgctcgccgtaataagaacactgtcgatatgcatgactttgaagatgcaaaagacaagatctatatgggtcctgaacgtaaatcaatggttctacgtgaagaagagcgtcgcgcaactgcttaccatgaagctggacatgcaattgttgctgagattttaccgggtactgaccctgtgcataaggtaacaattatgccgcgtggttgggctttaggtgtaacttggcagttacctgaacaagatcagattagccactataaagacaaaatgctaaatgaaattgcaattttgtttggtggacgtattgctgaagaagtcttcattcagcaacaatcgactggtgcttcaaatgacttcgaacgtgctacaaaaatggctcgtgcgatggtaacgaagtacggtatgtctgacaaaatgggtgtgatggtttacgaagatgaaaaccaaaatggattcttcggtaacgtaggtagccgtacaatttctgaagcgactcaacaacaagttgatcaggaagtacgccgtattttagatgaacaatataaagttgctcgtgatatcttggaaaataataaagatatcgcccatgcaatggttaaagcgttgatggaatgggaaactattgatcgtgaccaaatccgtgacatcatggaaggccgcgaacctcaaccaccgaaagtttatattgctgaaaatccggtatctgcgtttgagccgccaaaagatggtccatctactccgccgccattaccagcgatgaattaagttaattaataaagaagccacagtcatgtggcttttttatttgtcttaactttggataaagctgaaaagaaatcgacagcatgtaaagcttacttgctaaaatagccgctgattttgaaccggagctttttatgcagttaatatctttaccaaagcagattttacagtgtggacagcttcaattagatttatctcagccccatgttatgggtatcttaaatgtcactcctgattctttcagtgatggtggtaaacataaccaattagaccaagcggttgatcatgcacttagtatgattgagcaaggcgcgactattattgatattgggggggaatctacccgacctggtgcttcagaagttgtagtagaagaagaagtgcgtcgtgtggtacctgtggtcgaggctttatctcaccataacgttattttgtcgatcgacacaagtcagccagaagttattcgcgcagcaaaagcagcaggggcacatatctggaatgatgtccgtgccttaacacgtcccaatgctttaaaaactgccgtagaattagatatacctgtagtaattatgcatatgcgcggtgaaccaacgacaatgaatcagttggatcagtacactgatgtaacactcgatgtgatgcaagagttgcaacagcgtattgatgaggctttggctgctggggtaaaaaagcacaatattattgttgatcctggatttggctttgcgaaaaatgcccagcaaaatttaaaactattaaaagaattttggaaacttaatgaacttggttatccaattttatccgggctttctcgtaaacgtttcataggtgaagctttacaaggcgctcctgcagatcaacgtgctgtgggaagtgtaactgggcatttgcttagtattcagcagggagcatccattgtaagagcgcatgatgtaaaggaaatgcatgaagcaattttagtttggaaagcgatgcagcaagtctgaataatgacgttataaaattggactcactcagtgctcattaaaatagagtggatgagtgagtcgggtaaatatctcgtgatttttacgaaaatatgttataagcggcaagtttttgctgttgtgtaaacttttgtatgtttgaagacttacttctcccaatgtttgatgatgaatattatccagatattttggtcgctgaactcaagcagcttattgagcaatttgctaaaaaagttcaaaaacctgcgttagctgagcaagatatctatcgatacgctcatcaaactgtaaatgaaattaatgaaatgaagccacagttcgaagatctagactcatcgcttgatgatagtgctgctgattatattgctgaggcaatgatgatggtggtacaagatgcaggatatttggatctggaaatggaagagttggtgatgaatcgagagtggtgattactctcgattttcaaaatttttgagagcatctaataaatgacatgtctcgtctaagtgaacttcgtctattttctcaatttttaaaattaaatttccattctgctgttcatttacttctgccaacacgctgacccaatagtttttttgttgctgctgtagctctttaaattgagtaaatatctcttgaggggcttcaattagatagtcatcttgagtaatagagcagcgtacaaagtgccaatcattatttttgaacaagattgtaccgttaaatatatctttggcatttgcaaagggtataaaaaagagtagagcggatataaatattaatattctgatcatggcattattttcatcaggcataaaaaaaccagcttacgctggattctttatggcaccaaattcaatagttgaaaatggtgcccggggccggactcgaaccggcacgctttgagggcgggggattttaaatcccctgtgtctacctatttcaccacccgggcatgtgcgcaataatagaggacaagtgcgcgattggcaagagaaaaacagagagtttgctttattttcaatcagttcttatcagtatttctataaattaaccaatttatgtcatgatttgttcatcaaactgagatcagttgttcatcttctctacttaagtttaagacactcattgcttaaaacttaggtaattttatgtcagagaaaatttcacgccgagaattaattcaaaaaagtctgctcggttttggggctttatctatacctgttgcttttacaggttgtaatgatggctcagatgatgaaagcccagaaatacaagcagattttcttcatggtgtcgcaagcggggatccactacaagataaagttattttgtggacacgagtaacaccgacagactctggggtgcgcttaaaagttgtatgggaaatttcaaccgataatcagtttaaacaaaatttaaagacgggaatggttgaaacaagcaagactgatgactttacagtgaaagttgatgcagctgggttacaagcagatacggtgtactactaccgttttaaatttggtaataaagtttcaccggttgggcagacgaaaacattaccaacatccaccaataaagtgagctttgcagtatgttcttgttctaactatcctgcgggttacttttatgtttatcgtgaactggcaaaacagaatgttgatgtcattattcacttgggtgactatatttatgaatatggggcagatggctatgcgacagaagatgcaaccaagttaggccgtaatttacctgccgataataataaagaaattattaaattagatgattaccgcaaacgttatgcgctttatcgtcaagataaagatttgcaagcagctcatcagcgccatccttttattgtgatttgggatgaccatgagttggcaaatgatgcttggcgtgagggggcggaaaaccatcaaagtaatgaaggggccttttcggaccgtaaattagctgccctacaggcctattttgaatggatgccaattcgtccagtttctagtacagatcatttaaatatttatcgccagtttaattttggctctcttgttcagttaaccatgctagatacgcgtattattgcgcgtgataagcagcttgcatatacagactatatgacggctacaggcttggatattgcaaagtttcaggcagatttaactaatccggtgcgtactttgatgggatatacgcaaagagattggttggtcgataaattaaagcaatctacagcaacatggaatgtagtaggacagcaagtattaatgagtaaaatgtggattccagctgagttgttggcgtctttagggcaaattacttcaggaggaacttcgcctgaggcgcttgctaagatgaatgcacaaattaccgagttagtcgctttaaaacttcgtttacaacaaaatgatccgacattaacagcccaagaaaaagcaagaattatgatggttgcgccatataatctcgatgcttgggatggttactatgctgagcgagagtttgtgtacgataaattggcagagtttaataaaaagatcattgtgttagccggggatacacataatgcatgggcatcttatttatatagccagaaagggaaatatgttggagttgaattagcgaccagttctgtatcgtctccaggtttagaaaaatatttaagtattccactggctcagcttcaacagtttgaatttgcatttactacattaattgatgaattggtttattgtaatttaaatcaacgaggatatctgttggttactctagatcaggcgcaagttcattctgagtggagatttgtagattcaattaaaaataccgaatatcagatagattcaagccgacaaaacgatattgtattgaatctaaatttgatgccgttaaaacaaggtcaaaagactgcttgaaattatagaaaattagagggttgctgaggtaaccctttttttaggcataaaaaaaccagcttacgctggattctttatgacaccatattcagtacttgaagatggtgcccggggccggactcgaaccggcacgctttgagggcgggggattttaaatcccctgtgtctacctatttcaccacccgggctttaccaaatttggaggcggaggtcggaatcgaaccggcgtccacggagttgcagtccgctgcatgaccactctgccaccccgcctgcatttggtgatgcacatattagcaacctttacaaaaaaaacaatactgttttgagcgaagatgcacataaaaacaacatctagaataaaattgtcgaaattatcatgtattattggcacattaaattcatgtctaccttggagatgtgctgtggcattggttttagacggtcgtgcattagcaaagcaaattgaagaaaatttgttggtacgtgttgaagctttaaaagcgaaaacaggtcgtaccccaattttagcgactattttggttggggatgatggtgcttctgcaacttatgtacgtatgaaagggaatgcctgccgccgagtaggtatggattcattaaaaatcgaattaccacaagaaaccacaacagaacaattattagctgaaattgaaaagcttaatgccaatccagatgttcacggtattcttttacagcatccagttcctgcacaaattgatgagcgcgcatgttttgatgcaatctctttagcaaaagatgtagatggcgtaacttgccttggttttggccgtatggcaatgggtgaagctgcatatggttcagcgactcctgctggcattatgacgattcttaaagaaaacaatatcgaaattgctggcaaacacgcggttgtagttggtcgttcagcaattttaggtaaaccaatggcaatgatgttgttgcaagcaaatgcgacagtaacgatttgtcattcacgtacacaaaacttacctgagcttgtgaaacaagctgacattattgttggtgctgtaggtaaagctgaacttattcaaaaagattggattaaacaaggtgcagttgttgttgacgctggtttccatccacgtgatggcggtggtgtaggcgatattcaattacaaggtattgaagaagttgcttctgcttatacacctgtaccgggtggtgttggtccaatgaccattacaactttgattcgtcaaactgtagaagctgctgaaaaagctttaggttaatttaatttattcacggcggcatcctaccgtttaacgcaaatgttaggagctcgtatgttacttttctttcgggatgagtagcgaatgctacgcaagaccaaaacggttgcactaattaaagcagtggaattgaactaacgtatttttagtaactagccactatcatgctttaagctactgttttagtcttgctcgttatgcagatgatcaaatagtaattataaattgttgagcttatttatgagctgcacctttcaactgtccaaagtccctgaacatttacttcaagccttacatgaagtcattcctcattgtgaattaatggcacaacagttgccagaaactccaatttctttatggttgattccacctgtttttccaactgatcggttggatgacgaagttattcgccgtatctggaatgacacgccgtattggattttctgttgggcatcaggcttggcgatggctcagtggatacttgcagagccgcaccatgttaaagataaagtggtgttagatttcggagcaggttctggtgtagtggcaattgctgcaaaaatggcaggagcaaaacgcgtaatctgctgtgatattgatcaggtcagtttaaatgcttgccgtgaaaatgctttacttaatgatgtagaactcgaatatttggatgatttatataaggctgaacaagtcgatgttttacttgctgccgatgtgttatatgaccaatgtaatcgctttttcttagatgaatttttaaaatttgcaccagaagtttgggtagcagatagccgagttaaaaattttagtcatccaaaatatgaaaaaattgaagaaagaagtgcaacaacttggccagatctggatgaagcgaaagaatttagaaatgtaagtttttataagacgctgtaagagaacagcgcctttttttatgttatgaacaagtataacgaacgacttttaatgtacttggacgtgcttcaagtgcttggcgtgtcgcataatcttcaccattatttaagctaggtgtatttgataagccaaaagaagcgcgggtttcacctagttgaattccgtaatgctcatctttagctggattaggaatttcattgatgcttaaaattgataatttataaactttctgagcacctaacacattttgacaagcacgttgcaatttacgctcatcaagttgctggttactacgaccagctaaagtgtaagctaaagtcgctgaagtttttgtttggttttcaatctggtagccagttgaaccattatattgtcgaggcgtagtctgacatgcagttaaaatgaacatactacttaatgccaaacatagaatacttttattcatcagtatcgtccttattttcttatatgaagtatctcataaaatagaaacgttgttggagcttattcactaagttagagctaacattcacttatgatattagctctaattgaaggattttaatgttctttaatttttgaatgatgcttggtgtctttcatgaagatataaatcagcaatgaaatgaaaatcatgatactgacgtaaataaagaaccaagattcgtgcccggcttctttaaaacttaatgcaaaaaactcggctgtaccaccaaataaagtattcgcaattgcataaggtaatgcgacacctaaagctcgaatatgtgcagggaaaagttcagctttcactacagcattaattgatgtgtagccagttaccatgactagtccacctaaacataaccagaaagcagtccagtagttatgcgtgtttgcaagtgtatcaaacaaaatataagtgaataaaacacctgtaaccccgaaggcgatcataagcggtttacggccaattcgatctgataaggcacctgccaatggctgtaagcacataaagatgaataaggctaaagtggtaatttgagtagcctcaggcttggtaaaaccagaagtattcactaaatatttctgtaaataggtggtgtaagtataaaaagctaaagtaccaccagcagttaggaataatacagtgaaggcctctttaggataatgtttaaataaagcaaacattcctgatttcggctgatctgtttctgcttgagcgtttttaaaggattgagtttccaataagccacgacgaatacggaacaccacaatagctaaaagggctccgatgaaaaacggaacacgccatccccagtcatgcagttgttcttcggtgagtatcatttgcaagatgagtagtacgcataaagctgtaagctgtcctgcaattaaagtgacatattggaagcttgagaaaaaaccacgtcgatctttttctgccatttcacttaaatacgttgcacttgcgccatattcaccgcctacacttaagccttgaattaaacgtgcaataaccaaaagcaatggagcaaatacgccaatactttcgtaggaaggtgtaacagcaatcagtagcgaaccgatacacattaaagtaacggaaagcgtaaggcccgctttacgtcctttacggtcagaatagatccccataatccatgcgccaatgggacgcataaggaaacccactgcaaaaatagcggcagcttgaagaagttgagcggtttgacttccttttgggaaaaatgcatgagcaaaatagagcgtaaatgcggcatatacataccagtcgtaccattcgacaaggttaccggcagaaccgcccaaaattgattttagacgggtttttgtatctaaattagaatgtggagttgttgcggtagaaggttgatcaaccatgattcgctccatgtttcgcttgggttgaatgctaaaaaagagaagatttattccgtttttacatattatctacaggagtatttcactttattttttttatgtctgtaaaacaatgtttattatttaagcaaaggaataagttgaatatttatgtgatttcaaattagccgatcagcatatttttatcttctaatttcaatatttttcttattacttttttccatgcagtaaaaaattgataaagaatgggtaatgtttggacgaagaaaccctataccacttaaaaataatgatatattccaaagaaaattttaaataaatacagttaggcatgatgtttttgcattgtgggctagatgtgtgtggaaaatgaaagggacattcagatgtcaaattgcccgaaaaaatatattgtcgcttttgatcagggaacaacaagctcaagagcaattgttttagatcatgatgcgaacgttgtcagtattgctcaaagagaatttacccagatttaccctcagccaggttgggttgagcatgatcctatggaaatttgggcaactcaaagtgctgtatgggtcgaagcattggctcaagctggcatcaagagtgaacaagttgcggcaattggaattacaaaccaacgggaaaccactattgtctgggacaaaaaaacaggaagacctatttacaatgcgattgtttggcaaagccgacaaacaacggaaatatgcaatcaattgtataaagcaggttggcaagaatatatccgtaagaccactggtttagtcattgatccatatttctcggccacaaaaattaaatggattttggatcatgttgaaggcagccgtgagcgtgctgaacgaggagagctattattcggtacggtggacacttggctgatttggaaactaactaatggggccgtccatgtcactgattttaccaatgcatctcgaaccatgctgtttgatatcgaaaagcttgagtgggatgaaaagcttttacaagctttagacattcctagagcaatgttgccggaggttcgtagttcatctgaggtttatggatatacacataccattagtggacaagaagtaggaatcccaattgccggaatcgcgggtgatcagcaggctgcgctttttggtcaaatgtgtgttgagtcgggacaggctaaaaatacctacggtactggctgttttctactcatgaatacgggtaaaaagattgtccgttcagagcatggattactcacaactattgcctgtggtgcgagtggtgaggtgaactatgccttagagggtgccgtatttaacggtggttcttgcgtacagtggttacgtgatgaattaaaggttattaagaatgctaaggattccgagctttatgcaacacgtgtaaaggataataatggtgtatatgtagtacctgcttttaccgggttaggagcaccgtattgggacccgacagctcgcggcgcaatttttggtctgacgcgtggggctagtattgaacatattatccgcgcaactctagagtctatagcctttcaaactcgggatgttttagatgccatgcaacaagatgcagaagaagagcttcgtacactccgtgtcgatggaggagtaacggaaaataatttcttaatgcaatttcaggctgatattttagcgacaccagtagaacgtccaataatgaaagaaactactgctttgggtgcagctttccttgctgggctggcgacgggtttctggcaagatctacatgagttaagaaataaatctgccatagaaaaggtatttgagccaaaaatgtcttctgagcaatctgagatgatttataagggttggctcaaggcagttaaacgtagtcaaagttgggctgaggattagttcgttctttaactggttgaattcactagtagggtaatcaattaacggttaaacacttagttatttaaaattgattattctacttttttgattgttgtttcatcaatttgatgttttaatttttataagatcaacaataaaaagaacatgagaaatgaaagtacaacctaatgattattcaaaaatatatgatcttgccgtaattggcggtggtattaatggtgttggtattgccaatgatgcagcagggcgcggattatcggtatttttatgtgaaaaagatgatttagccagccatacctcatctgctagcagcaaattaattcatggcggcctacgttatttagaacataaagaattcaggctggtcagagaagcattagcagagcgtgaagtattgctagctaaagcgccacatattattaaaccaatgcgttttatcatgcctcatcgaccccatttacgccctgcatggctaattcgagcaggtctatttttttatgatcatttgggaaaacgagaaaaattattaggatcaaatctcatttatttcaaagaagatagccctttaaaaccagcgataacacgtggttttgaatattctgactgtactgtagatgatgcgcgtcttgtggtattaaatgcactacaagctaaagagaaaggggcgaaagtcgttacacgtacgcgttgtgttaaggcttataggcaacaggaattgtggcatctggagttacaaagcggagctgagttctatcagatacgtgcgaaagctattgtaaatgcggcgggaccttgggttgaagaaattattagtgaaaacctgagtttaagttcaccttatcaaattaggcttatacaaggaagtcatattgttgtgccaaaattatatgactgccataaggcctttattatgcaaaacgaagatcgaaggatcgtttttgcaattccttatttagaaaaatataccctcattggtacaacagatcaggaatacacaggtgatccacaaaaagtagagattactgatgtggaaatcgattaccttttgacagtgacaaattcacattttaaaaagcagttgacgcgagctgatattgtaagtcagtactcgggtgtgcgtgctttatgtgatgatgagtctgataatccatctgcaattacacgcgattatactttggctctacaggcagaagataaaactacaccattgctctcagtgtttgggggcaagattacaacttaccgaaagttagccgaagctgctttagagcatctggctccgttttttaatgacatggcagaggagtggactgcagatgagccattacctggcgccgaaaactggaccacactagatgatttaatcaatcagattaaaacacgtgtaagtggaatttctgactcacttgccaaccgttgggctcatgcatatggcacaagagtgtggaatatgcttaaagagcgaaatgctatagaacaattgggtcaacattttggccatgatttgtttgagtgtgaagtcagatatttgtgtgaatatgaatgggctcacacagcagaagatatactttggcgcagatctaaattaggtttggcatttgatgaaaaacaggtaaaagttttagaagcttatttatctgaacgtcgattaaaagacgatgccgcataataaaaaaggtcgcacatggcgaccttttttatatagagcaattagaagccagtttttacagcttcaagtaaagctgcttgacgttcttttaatgctttaggtaagcgttcgccaagtttattgaataactcagtgtggctttcaatttcagtaacccactggtctttatcttgatttgtgatgaggtcaaattgttctttagtgaactcagtaccttcccaattcaagtcttcatatgttggaacaaaaccgataggtgtttcaacagcgttcgcacgaccttcacaacgatcaatgatccactcaagaacacgcatgttttgaccgaaaccaggccatacgaagttgccttcagcatcacgacggaaccagtttacattgaagatttttggtaatttgttgccagaagcttcagctttttcacttactttcgcaccaaggtttaaccagtggtcaaagtaatcagccatattatagccagcaaatggaagcatcgcgaatgggtcacggcgaacaataccttgttgaccaacagcagcagcagtagtttcagaacccatagttgccgctttatatacaccgtcaacccagtcgaaagcttcagaaactaaaggtactgtatctgcacgacgaccaccgaagatgaatgcagaaattggaacacctgctgggttttcccaatcagcatcgatagatggacattgacctgctgcaacagtgaaacgagcatttggatgtgctgctttttcgccgtttacgtgaggttgacctttccagttagttaagtttgctggaacttctttagaaagaccttcccaccatacttgaccatcgtcagttactgctacgtttgtatagataacgtctttgtgaagagttgccatacagttcgggttagttttggtatttgtaccaggtgctacaccgaagaaaccagcttcagggttaatcgcatataagcgaccatcttcacctggtttaatccaagcaatatcgtcacctacagtttcgattttccaaccttcataacctgctggtggaattaacattgcaaagtttgttttaccacaagcagacgggaatgcagcagcgatgtagtgtttttcaccttgagggttagttacaccaagaataagcatgtgttcagctaaccaaccttgttcgcgtcccatgacagaagcgatacgaagagctaaacattttttaccaagtaacgcgttaccgccgtaaccagaaccgaaagaccagatttcgcgagtttctgggtaatgaacgatatatttctctgggttacaaggccaagcaacatctttttgaccttcagcaagtggagcacctactgtatgtacgcaaggaacaaactcgccatccgtacctaatacgtcataaactgctttacccatacgtgccattttgcgcatgctaacagctacataaggagagtcagttaactcgataccaatgtgagcaatatggctacctaaaggacccatagagaaaggaacaacgtacatggtacggcctttcattgaaccttcaaataaaccatttaatttttcacgcataacagctggatcttcccagttgtttgtcgcaccagcatcttctttattttgagagcagatgtaagtacgatcttcaacacgcgcaacgtcagatgggtcagaatttgcaagataagaaccaggatgtttttcttggtttaatttctgcatggtgccgttagcgatcatcaagtcgattagacgttgatactcttcttcgcttccgtcacaccattcgatttttgctggtttggttaagtttgcaatttcttcaacccatgctataagcttaggatgacgaacgaattctggtgcgttcactgtggtcatggtgaggcctattcaaaatatgtacaacgtacaagtcattcattgggatacaatgaaagatcaaataaaaaagtggctgtattaaagcataaaatcataaaaaaaataagactaaagactaactagcagatatttggagttttctttattttttaatgaaaatcatatgtttatatgtttttataaggtttttgcttttatatttttatgttatatgtatgttatttatctaaattattttgtttaaaatcaattaattaggcttgaaaaatttttttgagaattattattgattatacaaatgaagctcattcaaaatttacataaagagacttttaataggcgattttatatacaaaatagaataaagaactgactttacgataataaaatgcggcctttgaaacctctttcaatcatctataacgaaaaatcaggatttcatgcttcaaaacatgaagacgtctatgagcagctcatgactgtatttacagaatatggttttgaaatacaagtatttgaattaaatgaaaatacattatttgatgatttgataaataatgttattcatcgacattcacaaaatgaaaatacaggagtggttgttgcggcaggaggagacggtactttaaatgcggttgcaactaaacttaaaaatacttctattcccatgggaattctgcctttagggacttttaattatgttgctaaagttttagagattccgttagaccttttagaggcagcggaggttattgcaacaggtaaacctaggtcagtacatgtagcagttattaatgatcatatttatctaaataatgccagtttaggtttatatcctctttttatcaaaaaacgcgaactctacaataaatatttaggaagactgcctttacatgcctatacctcagctttagatgttttattgagagaaaataaatcaatgaagctttctataactgtagatggcaagaaatacccagttaaagcgccgctcattttctttggaaataaccaattgcaactatgtgatatgaagctcagaattgcagaatgtgcagcacagggaagagtcgctggagttgtaattacaaaaagtgataagctgagtttactaaatatgctttggcaatgggttcaaggtaaagttgaagatgcacaagatgtatatagtttttgtgctgatcatgtcattgttgattgtgcaaagaaaaccaaactcacagtggccttagatggagaaatcatagagatgaaacctcctttaaatttcactgtagaaaaaaatgctttaaatattatggtgccgaatgttactacatctgtctgatttacactttgggacagaaaaaaaagagtgtttagaggcaataagagatttttgtattcagcaacagcctgaagtgattgttgtgagcggcgatattactcaacgcgccaaatatgaacaattttttaaatgtcgacagtatttagatagcctcaatattccttatcttgtggtgcctggtaaccacgatatacctttgtatcatgtctggaaccgttttttttctccatttacccgttatagatatttttttggtgaattagagccgactttagaaactgaacatttttatattgttggggtgaatagtatacgtcgtcgttatcatacgcgtgggcatatttcgattgaacaaattcaagctacttatgagcgtttagacaggggacctaaaaataaaataaagctagttgtttttcatcaacccttttatacgccccctgataataagcatggaataaaagattgtccggttctgggtaaaatcgctttagaaaagtggagtacaactggtctatttggaatgttacatgggcatctccataaaacagctatatatgatttaactcagatttattctctaaaaatagatcatcctatttttgatatacatgcaggtacagcaacttctactcgcctatatcatcataatccaaatagctttaatacaatttcaaatgaaggaaaaattcagcattattggtttaattacgatttaaagatttttcaattaatttaatttataaaaattctataagacacttaacttatgagtagattgataaaattttatccattacaatgcttaagctaaaaattctatatatggggaataggaaaacattttaaatgttttatcattttaaaaaataatattaatgcataaaaagatttttactatataaaaagctgtgctttttaactagctacaatatggatttagttttttatgttctttaataatattttattaaaatgaatctctatttgacttaatattttagaaaaacttaataattatttgaaatttcatggtggaaaaatggtacaagtatcattaatggcaaataatgcttcaaaaaataatacagttgatattaatgttggccaaacaaaaaatattgtagtagatccgaaggtaatcgcaaaaattgatattaatccagaaaaaattgcttcaataacaagagatggtaatagtgcggttatccatctaaaagatgggactgaaattgttttagagaacttttttattagtgaaaatccacaaattcttttaaatgaggggcagatttattgggctgctaatttagctgaagatgctacaggacagaccactgttaattatttagaattaaaagagataccaaaatatatagatgcttcatcttctgtacctatctggtcttgggtggttagtgctttagctggtgcaggaacagttgcattattatcccagcaagacgccaaagataaaacacctccggaaccaggtaaattgtctttccaaaatcttttagattcaggggagttaacacaagatcaaatcacgaatgataacaagtttaatttaaaactcagcggacaggaaaagggaagtagcgtaacgtatttaatctctaccgatgaaggtaaaacctggcaagagacgacattaaatcaaaaagatttagctgacggtatttatctttataaagctgtagtgacagacgctgctggcaatacctcggaaacggctgtacaaaaagtagttgtggatactaccgcgccgcaagcaggtgaactgactttatctgacttgagtgatacaggtatttcagcaacagatcagatcacgcaagataaaaacttcaatttaaagcttgaaggacaggaaagcggcagccgagtaacatatttagtttctaccgatgaaggtaaaacctggcaagagacgacattaaatcaaaaagatttagctgacggtatttatctttataaagctgtagtgacagacgctgctggcaatacctcggaaacggctgtacaaaaagtggttgtggatactaccacaccacactcaggtgaactgactctatctgacttgaatgatacaggcgtttcagtaacagatcagatcacgcaagataaaaacttcaatttaaagcttgaaggacaggaaactggtagccgagtaacatatttagtttccactgatgaaggaaaaacttggcaggaaaccacggtagtccaaaaagatttggctgacggtatttatcaatataaagctgtagtgacagacgctgctggcaatacctcggaaacggctgtacaaaaagtggttgtggatactaccacaccacaagcaggtgaactgactttatctgacttgaatgatacaggcgtttcagccacagatcagattacgcaagatcaaaacttcaatttaaagcttgaaggacaggaaactggtagccgagtaacatatttagtttccaccgatgaaggaaaaacgtggcaggaaaccacggtagcccaaaaagatttggctgatggtgtttacaaatataaagctgtagtgacagacgctgccggcaatacctcggaaacggctgtacaaaaagtggttgtggatactaccgcaccgcaagcaggtaaactcactttatctgatttgaatgatacaggtgtttcagcaacagatcagattacgcaagataatagttttactttaaagctagttcaaccgattgtgattggggaacaagccgctttactagaccactatgaagtttcaaaagatgaaggaaaaacttggcaagagacaacagctgatcaaaaagatttagctgatggtatttaccaatataaagctatagtgacagacctagcaggcaatatctcagaatctgctatacaaaaagttgttgtagataattccttaaatgttgaatcaaccacagtgattgtaaagccgattactgaagacaatacaataagtctagttgaaaaagatcaagttatttctataagacttgaaatagctaatttacccacagatttaaatagctcactgacatcagtaaatacgacattagacaatgttacttataactttcattttgatgaagtcacgcaagaatgggttaccgaaattccagcagagtttctttggtcagtagagccgcaaaccaatatatcaattgatattagtcttactgatcaagctggcaatacagccattatcacacatacccaaaattataatgtggatcatactccgaattcaccaaccctagattcactaactttcaacaatatagatggagctatcatttcaggtagtgcatataaaggaagtaaggtcgatatctacaataaaaatggtgattggcttgcaagtacaataactaatgaagaaggtaaatttactttacaagatctttcaattaactcaaatcaagaagtttacgcagtcgctacttataatggttatagcagtgaaaattcatcaattgggttagttactgaagttccagctattagtattacacgaattagtccagaaggcgtgattagtggttatgcgactgaaggtagtcattttattgtaaaagatcagaatggaaatattctacaagaatttaattctaatgtatttgatagctctggtattacaccatttagtgtaatggcattaggcgaagtaagaccatttattttgtccctcgatcagcctttagaggaaggggctcaaattattatctctacagataaagataatatttcaggccatccacaatatattactgcagactatactccagcagtatttttagaaactccacaatttgatattagtggtgagactttatcagtacatgttaatgaacctaacagctttattcgtgcattttctggagaaggcaatttaattgctacaggttttaccgatgagcaaggctttgcaagtttacaagtgttccaatttttaaaagaaggcgaaacggttactgtacaagtagtagataaaaatcaaaatacgagtgaaaccctaatcgaggttccaaactttgcttatattccacatgttgaacgtattacacaagaaggcttaatttctggagttgctgaagataatagtacggtaattgtacgtgatgctgatggcaatgaattaggaaaggttacattaggtgatgataatagttggagtgactttagtcattttagcttgagtgtaaaccgccctttaattgatggagagaaaatttccgttcaaattattgataataaagggttaatgagtcctgagcaaaatatcatcgtagatctgactcctccacctgctccaacggagttaaatttcaatgatgctggtgatttagtttatggtcatgcagaacctttctctgaaattttagttaaagatgggcaaggaaatattcttaataaatggttttggaataactggaccgatgagagtggaagtttctcaatagaactaggtacatttttaaccaatgctgagacggtttatgtcacggctaccgatgtaaatggaaacgtaagtttagcagctcagatacaagcacctaattatgcctttgctccatatgttgatagctttacttcggatggcgtgataagtgggcaagctgaaaataatagtactctcgttgttaaagacgccaaaggtgacgttgtagccgaaattaaagttggtgaagataacggttggaatggatcgagttattttaaactccagcttgaccgtcctcttgttgatggtgagcagtttttcttatcaattaaggatgctcgtgggcaagtaagcaccgatactgtaattaccgctgatacggttgctcccgcaccagccagtaatttagttttctcagaagatggttcatatcttacgggtgtagcagagctgaatactacgattcaggtttttgatcataatggtcagctagtgaatatatggaataacaccattaactctgatggtacatttactatttacttaggtagcaacaatttacatggagaagcattcacagtcactgttaaagaccaagccggaaatgtgagtgaagctatttcaataaatgcgccacttgacgatattgcaccgaatccaattaaaaatattttacttgatgcaaatggtcaaaactttacagcacaagcagaagcaaatagtcagatcgaagtttttgattcattgggtaatcagacaggttggggttctacagatagtgcaggtaatgcttctggttctttcaatcaaacttatttacacggtgaggaactcacttttgttgttatagatcgagcaggtaatcgcagtatcgaatttaagcaaaatgctttaattgataccattgcaccaaatccgattgaaaatatcatcttcaacgaaaatggccaaagttttacagctcaggcagaagccggaagttctattgatgtattagatcagactggaaataagattggttttggttacaccgatagctcaggtaatgtatctggttattttcaacaagtttacttacacggtgaggaacttacttttgtcgtgatcgatcgagcaggtaaccgcagtgcagaggtcaagcagagtgctttgaatgatgacgtcgcaccaaatccgattgaaaatattgtattagatctcaatggccagaactttacagctcaggcagaagcaaatagccaaattgaaatcaaaaataataacggtgacgtcgtaggttatggatcagcagatagtgcaggtaatgtttcaggatatttgtatcaagtgcatttacatggcgaagagctcacttttattgtagttgaccgagcgggtaaccgtagtacagaggttaagcagaatgccttgattgatgatattgcgccaaatccgattgaaaatattatattagatatcaatggtcaaaactttacagcgcaagcagaagcaaatactcaaattgaagttaaaaatgctgttggtgagattgtaggttcaggttatgtggatggcgctggtaacgtgtcaggttatttatatcaagtctatttacatggagaagagctcacttttattgtagttgaccgagcgggtaaccgcagtacagaggtcaagcagaatgccttgattgataatatcgcaccaaatccgattgagaatattttacttgatgcgaacggacagaactttacagctcaggcagaagcaaacactcaaattgaagtcaaaaatactgctggtgaagtcataggatctggttcaaccgatagcatgggtaatgtttctggttacttctatcaggtctatttacatggtgaagaactcacttttgttgtagttgatcgagcgggtaaccgcagtacagaggtcaagcagaatgccttgattgatgacattgctccgaatgcgattgaaaacattatctttaatgaaaatggtcaaaactttacagcgcaagcagaagcaaatagcaaagttgaagttaaaaatgctgcgggtgaggttgtaggttctggttatgtggatagtgctggtaatgtgtcaggttacttgaatcaagtttatttaaaaggtgaggagctcacttttgttgtgattgatcaagctggtaatcgtagcattgaagtaaaacaaacagcctttcttgataatacagcaccggaaaatgcgactaatttagtatttagtgaagatggctcatatctaagtggtatggctgagccaaatgcgacgattcaaatatttgatcagtatggtcaattattaaatcagtggaataataatgttaattgggatggaacatttaacatctatttaaacagtaactacatgcatggagaagtatttaaagtagttgtagttgatcaggctggtaatttgagtggtgaggttactgtaaaagcaccgcttgatgatattgctcctgtagctgcaagtgatctggtctttaatgaagatggttcatccctttctggtgtagctgagccaaataccttcatccagatttttgatcaaaatggtcagcagatgaatacgtggagtcagagtgtaaatgctgatggtacatttactatttttttcggtacttacaatttacatggtgaagagtttacagtcattgttaaagaccttgctggaaatgtgagtgaagctgtttcagttaaggcgccgcttgatgatattgccccaaatctgattaaaaatattgtatttgatgcaaatggccaaagctttacggcacaagcagaagcaaatagtcagattgaaatttttgactcatttggtagtcagataggttggggctctaccgatagcactggtaatgtgacgggttacttctatcaagtgtatttacatggagaagaattaacgttcgttgttatagaccgagtaggtaaccgtagcgatgaaatgaagttaaatgctttgatggataccattgcaccaaagccgattgaaaacatcatctttaatgaaaatgggcaaaattttacagcacaagcagaagccaatagttttattagtgtcaaaaatgctgcgggtgagtttgttggctatggttatgtcgatagtactggtaatgtgtccggtcacttcaatcaggtttacttaaaaggtgaggaactcacttttattgttatagataaagcaggtaatcaaagtattgaatataagcaaaatgctttaactgatgatattgcaccaaatccgattgaaaacatcgtcttaaataaaaatggacaaaactttacagcgcaagcggaagccgatagccaaatcgaagttaaaaatactgcgggtgaggtcgtaggttctggttatgtagatagtattggtaatgtgtcaggttcttttaatcaagtctatttacatggagaagagcttacttttgttgtagttgaccgagcaggtaaccgcagtacagaggtcaagcagaatgctttgattgatgatatcgcacctaatcaaattgagaatattgtttttgatgtaaatggtcagtactttacggggcatgctgaagcagatactcgaattgaagtactagatcaatttggcaatcgcgctggttggggatatgttgatagccaaggtaacgtgataggttatttcaatcaggtttatttacatggagaggaattaactttcatcgttgtagatatagctggtaaccgaagtgttgaagttaagcaaaatgctttaattgatgatgtcgcaccgccagcagcagcaaatattacattaacttcagacggattgctttttggtgaggcggagccaaactcaactgttgaaattattgatcaatatggtgcagttatcacaacaacttatgtttggtacgatggcacatttaatcaatggattaatttgagtcaataccagacacaaaatttaagtattgttgtcaaagatcaagcaggtaaccgcagtgaagttgctcatcagttagtaccagtatttaccaactcaccaattgctgcaacagagctaaaattggatatagatggtcatattctaacagggaaggcgacagtaggaatgtcggttgttgttacatctactgatggtcagaccattaacggagggtggaataatgctgtgaatgaagatggtagttttgctattcagttaaatgattactatctacagggacagacattacaagttcgagtttatgatcagaatacgaatcaatatagcctaatctctgaaattattgcgcctttagacaatattgctccaataattaatgatgtggtaattaacaatgatggttatagcattactggacacactgatccgaaagtaatcattaaagtaatggatgaggacggagattttagagcagaatttcaatcggatgaagcgggatatttcaatgctagtatttatccaccactattacgtggagagcagttatttatcacggcaacagatttagccaaaaatataagtacgccatttaatattacttttaatgcagatattaatgcaccaccttcagcaaatcatgttgtgatatctgaaaatggtttctttattgagggaactgctttaccaaatagtgtggtgcgtatttatgatgtgtatagtaattatattggcggtggttttgtagacgaaacagagcattttaatatccagttatattcacctcaggcgaatgggcaaactttacgcgttgttgtggagcaaaatggctatcaaagcgcttacaccgaaattaccgcacctatagacactgtcgcaccaaatgcagcaactcagcttgtcttagaagatggaaatgtactttcaggacaagcggaagcatattcaacagttaatatttttgatgctaataataatttagttggtcagactactgtcggaagtgaaggtagtttcttaacacaattatggtcacaatattggcatggagaaacattgacggtaaaagtagttgatgccaatcaaaatgtgagtgtaagtacgacgattactgctacaaatgatacaacagcaccgaaagtggtcacccagcttgccataaatgaatggggtaattggctggtaggacatgccgaaagcaatgctactcttgaaattacatattattttgctgatcaagaaccttccgtaacgagtactacggtcatggcagatggaactttctctacttatgtgtatgggactgcaacgtcatttgaccttactgttattgatcgtgcaggaaatcgtagtgaaactatcagcaaagcgattaatgatttacctacaatcactgttgatcagtttaaaggtgatgctacggataatacgtatatagttgatcatataagtgattttgttgaagaatatactgttgagccgtatgcaatatataaagatgtttggattgataatagctatatgtatccagaatgggttagtgaaggtcattatgaacaaatatggtttgttgatggatattatgattcccaatggatcacaagtggttactcaactgtacaaaatgtttatcaagatcagaatggtataacttatattgataatggtacggcagatagcgattatagtcgatatgaacaacaatattatgatttcgtgaatgggcaatggcaagaaggctacgaactgacttatatacgttctgaagaaggttgggttgatacaagtcataatgaagatgtttatattgatacaagtcattatgaagatgtttgggtagatactagccactatgaagatgtttgggtagaaagtggctattgggagaaccagcttgtcgaatcaggctaccgagatttcgattttggtggacacgataaaatagtaagctctgtgagttatagtctggttggatattctgattggtcgacaggtctagaaagcgggcgttatgtagaagacttggaactggttggttctgctcatctcaatgcaacaggtaatgctttagataatcttttaacaggtaactctggtaataacattttgaatgggcgtgaaggtaacgatacctatatcactaatgaaggtactgataccattctgttccaattgctaaatagccaagatgcgactggcgggaatggacatgacacggtgttagattttactttaggtgatataagaactaaccttcaagctgacaaaatcgatttaagtgaactattaattgactattctaaagatgtaagcgcattagctaaatttattactgtagagcaagatgctgggaacacgactattagtcttgaccgagatggcgaaggtacaatgtttaatagtgtgtcactgttaactctaaatcaagtaaatacaacattagacgaattactaaacaaccagcaaattattgtttagtatgaatatttaactttaggaaagaggctatgaaaatagcctcttttattttgtgctttaaatttaataaaaactcttcacaacctgttaaaaaatgaccaaaaaaatagaatttttttcattttccccttgaagccatttttttcatccccacaaaagtgacatctaaatattttgttattgctctggattaaagcaataacgattaatcaaaaagactaagtctgatggagttaattatgagcaacattcgtccattacatgatcgcgttgtgattcgtcgcgtagaagaagaaaccaaaactgctggcggtattttattgccaggttctgctgctgaaaaaccatctcaaggtgaagtaattgcagtaggcaatggtcaaatcactgataacggcgtacgtgctttggatgttaaagttggtgacaaggtgttatttggtacttatgcaggtacaacagttaaagtaaatggtgaagaactcttaatcatgaaagagtcagacatcttagctgtattagaaggctaatcgatccataactcaattcattatcagattcagtatttaaaaagattcggagtttaatatgtcagctaaagacgtaaaatttggtgattcagctcgctcaaaaatgattgcaggggtaaacgtacttgcagatgcggttaaagtgactttaggtcctaaaggccgtaatgttgtgatcgaccgctctttcggcgcgccgcacatcactaaagacggtgtaactgttgcaaaagaaatttcattaaaagacaagtttgaaaacatgggtgctcaacttgttcgtgaagtttcaagcaaaactaacgacatcgcaggtgacggtacaacaactgcaactgtacttgctcaagcaattttaaatgaaggtatcaaatcagtaactgctggtatgaacccaatggatttaaaacgcggtatcgacattgcagtaaaaactgtagttgaaaatatccgttctattgctaaaccagctgatgatttcaaagcaattgaacaagtaggttcaatctctgctaactctgatactactgttggtaaacttattgctcaagcaatggaaaaagtaggtaaagaaggcgtaatcactgtagaagaaggctcaggcttcgaagacgcattagacgttgtagaaggtatgcagtttgaccgtggttatatctctccgtactttgcaaacaaacaagatactttaactgctgaacttgaaaatccgttcatccttcttgttgataaaaaaatcagcaacattcgtgaattgatttctgttttagaagcagttgctaaaactggtaaaccacttcttatcatcgctgaagatgttgaaggtgaagcgcttgcaactcttgttgtaaacaacatgcgcggtatcatcaaagtatgtgctgttaaagctcctggtttcggtgaccgtcgtaaagcaatgcttcaagacattgcgattttgactggcgcaacagttatttctgaagaagttggtatgtctttagaacaagcaactcttcaagatttaggtacagcgcacaaaattactgtttctaaagaaaacacagttattgttgacggtgctggtgatgctgctgctatcgctgagcgtgttcaacaaatccgtgctcaaatcgaagagtctacttcagaatatgaccgtgaaaaattacaagaacgtgttgctaagttagcaggcggtgttgctgtaattaaaatcggtgcagcaactgaagttgaaatgaaagagaagaaagaccgcgtagacgacgcacttcacgcaactcgtgcagcagttgaagaaggtgttgttgctggtggtggtgttgctcttgttcgcgctgtaaatgctcttgaaggcttaaaaggcgctaacgaagatcaaacagctggtatcaacattttacgccgtgcgatcgaagctccacttcgtcaaatcgttgcgaatgctggtgatgagccatctgtagttatcaacgctgttaagaatggtgaaggtaacttcggttacaacgctgcaactggcgaatatggtgatatgttagaaatgggtatccttgacccagctaaagtaactcgttctgcacttgagcacgctgcttctgttgctggcttaatgttaactacagaatgtatgattactgacattcctgaagacaaaccagctgctccagatatgggcggtatgggtggtatgggcggaatgatgtaataacgcatcaacgctttaacccaaaaaaatccctgcattcgcagggattttttttatttttccagtaattttaaggataagttaagttcagaaccctaaaattaaaacaggaacagcagctagaagttcctcttttgttacaaccatgcttatctatttataagcatggttttttttatccaaataaaataataagccaagtggcgacaataatagaaagtgcaacaaactgagcggcactacccatatcttttgcatttttggaaagttggtgtttctcgagtgaaactcggtcaaccactgcttcaatggcagagttgaagagctcaacaatgatggcaaataaacagacaatgatcatcagggcatgttcgccgcgagttacatccaggaaaaagcttacagggatgagtacaagattaattaaaacaatttgccgaaatgcagcttcattttgataagcagctttaaatcctgaaattgaataactggtagcgttcaagatgcgctttaggccacttttacctttatagggagaataactatccattcacttatatttttgacacttttcatgcattatatagtgcagcccttaaaaaaatattaaatcttttttaaagattttgactttataactccatagagaagaagagatgaaaaaactatttgtagccttaggacttataatgggtagcttgcatataagctatgcagaaccagcttcagctcaacaagtacccggatattaccatcatcaatttggtaattatcggataacttccttgctcgatggcactatttatctagatcctaaattgtttaaaaatttaagtccggctgaaaaaactaaaattttaacgaaatatgctgctgtaaatgagaaggggattcagacttcagtaaatgcctttttagttgatgatggtaaaagtttgacgcttgttgacagtggagctgcgagttgttttggtccacagttaggttcaattgctaaaaatcttgaattagcgggctatcaacttgccaatgtgaaaactgttttattgacccacttacatccagaccatgtgtgcggtattgctcaaaatggaaaagccgtatttcctaatgcaacgatctatgctcatgaacgtgaagcagattattggttaaatccagcaaatgaaaaaactgtaccagcggataaaaaagaaaattatttaggtactgttaaaaacgtaaaagctgcacttgcaccttatcaagcaaaaaaagcattcaaaacctttaaagatggtgatgttattcaaggttttgaagtgatcaatacacatgggcacacaccgggacaccatagcttccgtttgaagagtaaagggcaacaaattgtctttgttggtgatattgtccactcacattctttacagtttgatgctccaaaaactggggtagattttgatgtaaattcagagcaggcaattaatactcgtttaaaaatgtttgctgaaatttcaaataagcaacaatgggtagctgccccgcatttaccgttccctggaattggccatgtgtataaagtgagtgctgagcagtatcagtggattcctttatattttaataacagtcttgataaataaaaaaacagggcattcattgccctgtttttttatgaagattgagttattttactgctttttcaaaattagtgacagcttcgcgaccgagtgccgggtcatcggtaaagacgccatcaacgcctgccttgaaataggcttcaaactcttttaatgcaccagatggacaacgttctgcaggtttatctgggctgcactttaacggcgctggtaagaagttgttttctggtcggaaagtgtaaggatgtacttttaaaccagccgtatgtgcatcagcaataaacgtactagttttataagagccatcattattaaaggtcagtatgtaacctttacttggtcctacaccatttgcatatttggcaacatcttttaacccttgtgctgtggctaaatcagcataagttttagtgtcaccagactctacgaagtctgctggtcgagatgtttttgaatcgtatagctgaataatttgtgcatgtttaagcgttttatgaagatcaagctccctttttaaatcttttagattctgaacttcaaaagactgtaaatagacaggtgcaatatcacgtgtatatttatatttggctaaggtttttagaagagtatcttccattgccagattttgatttttaaaataagtcggatgtttcgtctcaatatataaacctataattttccctgtctttttatagttagcttcggcaagctcaatgatttgttctagagttgggacagggtaaaggtcattataagctgtgttggctggtcgaaactcaggaatacgttcacgcgctttaagctgctgtaattcacttaaagtgaagtcttccgtgaaccaaccagttaagtcgacgccatcaatattttttgttttttacggtctgcaaactgacttaaagtgcttacattggttgttccaccaatctcattttcatggcgggcaaccagtacgccatcttttgtagagactagatccggttcaatgaaatctgcgccgtcatcaatcgctttttgatatgaagctaaagtatgttcaggacgtaaagcgctagcgccgcggtgtcctactactacaattttaggaagttgatattctggcgtggttggcgtcgtttcagttttatcgtcatcattacaaccaaccaagctaattaaacttaagcataaaagtgcttttctaaacataattctactcatattgttttagttgaaacgactcaagtttcagggctttgtttgacatgatcatgaagaattcatgaattttaagtgacactcgttaactggttttttattggtttgttggaaatattcaatcacgctttgtttttgtcttaattacatttattgtttaattctacttgtcttttttataccgctcgttgatcatcacaaggtctcgaagcggcatttacttctgttaattaacgacatcataccgagcagccatgctatctaaattttttattcaacgccccatttttgccaatgtattggcgatcattgttatggctttcggtattttttcggtcatgaatttgcctgtagaacggtatccagacattgctccacctaaaattactgtgtcagccaactatagtggtgcagatgcacaaacggttgagcaaagtgttactcaaattttagaacagcaaatacaagggattgatcacttactctattttagttcatcaagtgactcatcaggacgtagccgaattactataagttttgataacggaacaaatccggatactgctcaggtccaagtacaaaatagtattagtggcgtaatacgtcgcttaccggatgaagttcaacggcaaggtgttacggtaagtaagtcactgggtgacacttttatggtaattggcttatatgactcgactggtaaaacaggaaacattgagctatcggactatttaactacgcatgtggtagataacctgaaccgtattgaagggggggtgaaactgatgtatttggttcacaatatgccatgcgtatctggttaaatccggataaattaaaacaatataatttaatgccaagtgatgtagcgaatgcaatcaccgcacaaaatactcaggtcgccgcaggggcaattggtgacttacccgtaattgacggtcaatatttaaatacaaaagtcacagcaggttctcgcttaaaaacagttgaggattttaaaaatattgtcgtgaagtcgaataaaacggcgagttatgtgtatttaaaagatattgccagagttgagctaggtgcagaaaactatcagtcttttaacactattaatggctatcctgccgcaggtttgggtatttctttatcttcgggtgcaaatgcaattcagacctctaagctcatccaccaaactctagatcagcttacaacgaaactaccagcgggttataaaatcgtttatccacgagataatacgccgtttgttcaagagtcaattaaggaagtagtaaagactctggtagaggcgattattctggttattttggtcatgttcctgttcttacaaagctggcgtgctacgctcattccgagtattaccgttccagttgtgattttaggaactttcgctgtcttatatgtgcttggttttagtattaacaccttaacgttatttgcgctggtactcgcgattggtttgctggtcgatgatgcaatcgtggtcgtggaaaatgttgagcggctcatgcatgaacagcacttatctcctaaagaagctgctattgagtcgatgggggaaattagtggtgccttagtcggaattacgttggttttaactgctgtttttattccaatgtcctttttaggcggttcaattggggtgatttaccgtcagttttctattactttagttgccgctatggcgttgtcgcttattgttgcgctcattttaacaccggctttatgtgcattaattttaaaaccaaatcttcaacctcagcgctgggccgtatggtttaaccaaaagattgagcaacttaaaaatcaatatatcaagcttgttcagacgagtattcattacagtaaatcagttattgtgatttttgtggctttaattgccgtttttacgctgttctataacggtttaaaaagcggttttattcctaaagaagaccaaggaattttaagtgttcaaattaagctcgtagatagcgcaccaatttctcaaagccagaaaattggtgagcaagtccgccaatatttcttaactcaagaagataaaaatgtagatttggttttaatccgctatggacgaaattattcgggcacaggacaaaacttggcacaagggtttattgctctaaaaccgtgggatgtccgaacaggaaaagaaaactcggctgaggctatacaaaagcgtgcaatgaaatactttagtcattttaataatgcacagattaatgtgactttacctgcctcagttaatggcttaggtcaaacagatggcctggatttatggattcaggatttgaatggacaagggcaagattttctagatagtgccttccgccaattgcaggctcaaagtaaaaattattcaactttcgaaaactttgataagcagtcaaccaatagcaaggcaaatcttaatattaagattgaccagaaacaggcactagcaaatggactacagctatcggcaattaataatactttatctagcgcatggggcggaacttatgtaaatgactttattgatcggggccgtattaaacgtgtcatgattcaaggtgatgccgagtttagatctaaaccggaagatttatataactggtctgtacgtaatgaccaaaatgaaatggttccctttagttcatttgccaactttagctggggcggggcgccggaaattgtaaaacgctatatgggatatagtgctttacaactacaagcagatgtcgcgagtggcagcagttctggccaagcgatgaaagatgtagaacaacttgttaaccaacaaaaagatattggtttagcgtggacaggtttatcttttgaagaacagaagtcgactaatcaggccgtatggttatatttaatttcggctggatttattttcttatgtttagctgctttatatgaaagcttaagtattcccgccgccgtaatgacatctattccgcttggtgtaggaggaagtgtgattttctcttatatttttggtttgccaaatgacgtgtatttccaaattgcgctattaacgactattggtttgtcatgtaaaaacgccattttaattgttgagttcgcggccttagcgcaagaaaaaggtaagaatgccattcaggcggccttagaaggtgcgagcttacgattaagaccgattttaatgacatctttggcttttggtgctggtgtgattccgcttgtgtttgcacaaggcgctggtgcggttagtcgtcaagaaattggtattagtattttaggtggcgttatgtttggtactgtgctggttctgttctttattccagtcatgtacgtgttactgcgttccttgttcagatcgaaagcttcaacctaaaagtaaacaatttaaaaacgggcatcaaatcaagtatattaagattaacttttcttcttatatttgattttgatgcctcaagaaaaaaaattaacacagcagcaggttatcgccctagaacgggatcttgccaagttcgcaaccatgatggatagtgcggtccgtattccttttacaaagcagggtattggcgctgatgctgccttaagtactattccaattgccggtgatgtcgctgggttcgcactgacgtgttatgccatttataaggctaaacaaataggtgtgcctcagcataagctcactccagtgatcaaacttgctgtagtcgatgccgtagtcggttttgttccagttgcagggactattttcgatatttttatacgaccaagtcgaaaagcattagatgtggtgcatacgcatattcgtgaagaatatgcgatccaaagtgatattcatgtcgttcatccgtatttacatgaaaagctcgaaaagaagcaacaacagtcggccttctggcgtaaccctgttgtgagttggttatggttgcacatacccgatttattaggtgcgtttgtactgctattaattggcttagctgtgtggtggggtgcaagttacctttggggactttatcaaaccatgtaatcaaaaaataaagcctccatttggaggctttatttttacattaaacgttttatgggcaatctaattggtgtagagctgccacacgttgttcaattgtagggtgagtttggaacaatgcagctaaactaaagccttgttctttaccttccgcaattgcgaatgctttcatttcttttggcatttggtcaggtaactctgtttcagcttgcaaacgtaataaagcagaaatcatcgcttgtttaccagctaaacgtgcaccggcttcatctgcacggtattcacggtaacgagagaaccacatcacaatggcagaggcaagaataccgaacacgatatctagaaccattgtaatgatgaaataacccatacctggggcttcattgtcttgacgaccaaagacattacggtcaataaagtcacctactacacgagcaaagaacataacgaaggcgtttactacaccttgaatgagtgcgagtgtaaccatgtcaccatttgcaacgtggccgatctcgtgcgcgagtacagcacgtagctcatctttgttcatacgctcaagtagaccgcttgaaacggcaactaaggcatcatttttattccagcctgttgcaaaggcattagactgatatgaagggaagataccaacttctggcatattaataccagcacgttgagaaagttcagcgactgtttgcaataaccagctttcagcttggttacgaggagcatttgggtcaatcagttctgtaccagtagttttcttagccatccatttggacatgaatagagagactaaagagcccaccataccgaacacaaaacagatgactaaaaggttgcctagatttaagccacccgcgccatggtaactaccgacaccgaagagtgacaaaataatgccagctacaaccagtaccgcgaggttggtaagcaaaaacaaaccaatccgcatcattgagaaaatcctcttataaataaaatattatctgatttataaattataaatcactcagctaatatgcggcgcttaggggaaaaattcaagaaaaaaataaggaatcaatacattctttgcgatcgaagaatgtatttaaattaaacaagttattagagagcccctctgaacacgacagtgggggtaatagatcattacaattttttgacaatagggcccgctaaataaataaccgtaaggtatgaggcttttaaagcttactcaatccggatatgtgcaatagcagttgcattattggtgacataagttcccgtaggtgcatctgtatatgtaccatctggcaatgtaacgatttggcgcgaagaagaatacttaataggctgagcagagacttgcgtcgaagtactgtgcggtatggctggttggtttatcgcttgggcagaaatactcgaattgctaaaagaagaaaggcctacaccagaagaatataagttttggtagcggctagtgactcggcgaacataatcttgggtttcacggaatgggggaataccgccatatttatcgacgtttccttctcctgcattataagcggcaagcgccatttgcgtattaccgttaaaacgtttgagcaaccaacttaaatatttagcaccagcgaagatgttttgctgaggatcataagcgttagatacgttaaaacgacgagcagtagccggcataagctgcattaaaccttgggcaccaaccggagagtgggcatttacgttaaagccagactcggtatgcataacggctttgattaatccttccgaaacgccgtgctgttgtgctgcctgcttaataatatgatcaaaagcatttttgtttttgctatagcttggtagaaccgaagcttctgaagtcccccagttgctataactatgaatattactatccgggtagtaggtgacttttacttttttgagtgaatggtcataacttttacggttagtcagtaaagtactgccgtttttgtcttggtaaatgtacatctgacctgctgaagtcggcgttatacctaccgaaaaagtggtcatccccagtaaacaagaaaaaagatattgaaccgaatttttcattttatgttattcacaattttagggtctcaaaacttgtcaaagagtttatcaaaaaatattacttaaagaagttttgtgtaattttttttattttgactctttgaaaaaatcaagcagttttgctcgaatgatcatcaaaaaaaattaaaaaaatttttaaaatgattctattgacttgaataactatttgaaaaataagggtaaaaatcattggttaaaaaatgatcaatttaaataaaacccttaacagaaggtcaaaacagtttgtcaagtattaagaaatccacaattttatccacaggttttgtggaaaactgtggaaaagtccaaaaagtaagcattttgcgcaaaaaatgaactcgtcggtcaaaatggcgcactgcttttgcatcatgcctgagcattatgacgacttcaagaattgaaactattcttttgatgcgattctcatccgaatcatataaaattgcgcggtatttttatttatgggtatatctcgtctatgtacgcgccagttgagtccaacgaaggatttaattttaagcctgaacttccaacaagctcggcctattatcgtttgcttaagaagcttcgccgtcaagttggacatgccatccgtgacttcaatatgattgaagatggtgacaaggtcatggtgtgtgtgtctggtggtaaagacagttataccttgctcgacattttgttgcagttcaaacgtattgcaccaatcaattttgatattgttgcggttaaccttgaccaaaagcagccgggtttccctgaagatgtcttaccacgttatatggaagaaaataacattccgtattacattttggaaaaagacacttacagcattaccaaacgtttaactcctgaaggtaaaacgtactgtgctgtgtgttcacgtttacgccgtggttcgctttatggctttgctcaagaaattggtgcaaccaaagttgcgctagggcatcaccgtgatgacattattgctactttcttcttgaacttattccatggcggtagcttaaaggcaatgccacctaagcttttatcgtcggataagaaaaatattttgattcgtcctttggcttatgttgaagaaaaggacattatcaaatatgcagagttacgtaagttcccgattattccgtgtaacctttgtggttcacaagagaacttacaacgtgccatgatcaatgaaatgcttcgtgaatgggacaaacagtatccaaaacgtttacacagcatttttggtgcgttacagaacgtttcaccttcacaacttgctgaccgtgatttgttcgatttcgaagttcttgactcgcagcgcgaattagactttaaagatccagaagaactgaaaaaacgtttagatgtagtgaacttaagctttgctgctgaataaaacgaattaataagtcaattgaaggcactttataaacaagtgcctttaatgtatcaaaatactaaaaaatgaatgttccgtacaaaaagtcatagctcaaccttaaaattacatgctataacaacgctcaagcagaagtgcttcacacgatgttgtctggataggcaacactagagaaattgaacaaataaatttgaggaagaatcatgcctgcatttttaactgatgattggtttgcgactgtcgaaaaattaactgctgaagcaggtgatcttaatttgccaccagctcttgcgaatttggcaattaatttagtagttacagatgcttctggaaataccgaattagcgttagatgggggtaaaatccaaaaaggtttgtcttcaaatgccaaaactacattaaacatggatgctgaaactttacgtaaagtattccttgagtttgatatggcagctgctatgcaggcattcatgactggtaaaataaaagttcaaggcgatatgtctcagttaatggctttacaaacagctaaaccaagccaagaacaaaaagatttgttcaaaaaagtattagagcaaaccgcttaaactaaaaaagaattcatataaaaagcttacccgagaggtaagctttttatttatacaaacaatgaatttatcaacttttagatgataaaaactagatattaattcgcgtttgtgccgttttaatgtgctcaagataagcacgtatacgagtcacatactgaactgcttgtttgtatcgaccattgcgagttttgttactctgcaaataattatagagattaacccattggttcgggtctttcccttgggcttgcaagcgcttttgaatctggttcactgcacccggtcccatattgtaagccacaagcgcataccagttgcgatctgggaaaggaatatcatcatactcacttaacatgagatcataatatttcgcaccgccctgaatactctgtgctggatcgttacggttactcacacccattgcccgagctgtactattggttaacatcattaacccacgtacacctgttggtgaaacagactccggttttaggtacgattcttgataaccaatcgctgcaagcaaatgccagtctaaatcgtactgagcagcactttgtttaaagcttgctttgtaaatcggtatacgtgcacttaagtcacgttgaatcgtagaccaagcttctggttttacaacattacggttataaaaagaagcaagttgctgagttagaccattttgtttgctttgacaaacaaaaccgcttgctgtttgtgtaagcggatcatctgcttgtttaaacacccagcttagattcggatttaatccatttttttgcaaatttacgatatcaccacaacttgcagaaaaagacattaaacctttgttctcgattgaacttaagcttgcggttgtcatggcaagatttgctttaccttgctgaacccacttaagcgccgtggcattgtctgtcacgattttgaagtccaactttacatttaagctttgtgcatagttacgcgctaagtcataaccgaagccgtgtaaaaactggtcttctttaaaaacagtcgttgggctttctacagcaaccactgttaatgtgtttgtgttaactacagtattgtactgtagggtttttcctgcattgatactatgaaagggaaaaaacatagtgctgagcgcaagaactttcaatgggagagaagaaaataaagagctaaggccaagcctcgacccagaacttgaattactgtgcatgttgtctccgctacaggtaatttatgccctaaaagtcagacaaaaagctgccataacttctaaaagttgataaattcaataaggggtgggcagtcatgacgtcattcaaaatgacatgaaatgaaaaaagcaaactgtgtagaaaatctacatagtttttgagtgggttaaaaaatactcaacatttaagatgcgcgcatcataatattgataaaaagtattgtcaaattttgtacaattaaatatccgatatatcatcataacaacatgaatttattaaggaagaaaatttatacacttctgatgtgagaaaatagggtataaaatgctacatcttgtaacccttatgttgttaatcagtggtttttaatcatgaaatctaacttaatcactcggtcaggccatgacaaattagttgctgaattaaaacaactttggcatgaagaaagaccagaaattacgaaaaaagtaaattgggctgcaagcctcggtgaccgtagtgagaatgcagattatcaatataacaagcagctccttagaaaaattgatcgacgagtacgctacttaggaaagcgtttagaagagttaaaaattgttgattactcacctgagcaagaaggcaaagtttactttggtgcttgggtcgacattgaaaatgaagaaggggagcaaaaaactttacgaattgtcggggtagatgaaatttatgatcaccatcctcagcatatttcaattgagtcacctatggcacgtgcactcttgagtaaagaagtcgatgatgaagtagaagtacacacgcctttgggcaaaaagctgtggtatatcaatgcaattcgctatgaaaaacctaaaaatgatgaaatttagatagatttgtttttattttgagcgtttgaattaaaaattaaataaaagatttgccaacttgcatttttgtttatattatagcgctcgttggaagcgtggcagagcggtttaatgcaccggtcttgaaaaccgacgagggtgtgagtcctccgtgagttcgaatctcaccgcttccgccaaaattcttaaaaagcccttgttaatgacaagggcttttttttatgcatataagttactaaaaaatgatcgtgttcccttctacatatttctaagtatagtctctcccgttcgagggttcgttaaagtgacattttccagcgcctgaatgtaccaagaatgattcttctgggtgagcacagtaagaatgagagtatcaatctgatgaggcccttgaggatgagctacgcctgcagtgaggcggctccaaaaatgtgaaatacatatatcctcactcataggtatgaggtctatcagctcattctctagtgttgaatcacgataaatggtttcatgaataggttgatgcattgcaataatttcatcaactcctttaacgtagtgaccgaaacggttaacgaaagtcgcatctttatcaaaaagagcagcaaaggcctgcatatcatgcttattccaagcggtttgaaatgctaaaggtatttcttttgggtttattatgtgttgactcataccagcaccactgtttaattctttaagtccattttcaaatattataaataaagatacttcgtcatgcttaaatgaaacaggtgatcttagctcgcctttcaagagtatcttcgttttaacccacatggcccaccgcacaaaataggataggttgagttatgagtagaacgtgtaaataactgctcgctcaatccgcttaatggagttaactttttataaaatccagataaagatataagttaaaaagaattgatgcatacaaatttaatataatgttaataatcaaacattatgtataaatttaaataaactcttttattttttaagaactcttttaataattcagaactaaacaattaagtttaaaatatggagaatttgtatacaggatggcttttattagtttaattaaaatgagaactatataaatcttgtgaattctagctttttacttcattagttttgtacgtttttatcttaaagataatcataaaattagaataataatattaaatatttgatttttatttataaattaaaattaacagctaaggttcttactgtgttgaataaacatcaaaactaaaaaatttaatcttgctttaagttctcttaattaatttatggcctatctagatttcgttaatgggtcagaaaaataaattatgacttcatttaagccaaatcagaaaattaagagagtataaaaatgaaccagtttgtaacgaacacgaaaaatgtaattcgtggaaagtatcatccggaatttttgcagaatgaagtcttagccgatatttttgctcatactgcacaaactcttcctgataaaacggctttaattgaagcagataaaacgctgagttatggtgagctgtatcagcaagccttaattatggctcaacatctggctttaaaaggggtaaagccaggtcatattgtagggctatggctgccgcgtggtattgagcttttaaaagctcaactggccatttgtttaagcggtgcagcttggcttccttttgatatggatacgcccgcggaccgtattgcggtatgtcttgaagatgctgaagcggtaggaatgattactacagatgaatggtatgaacatttagctgaagtgccgcaaacaaaatggaccaacaccgagctgcaaaaaccattaagcgaaagtgtaagtttagcgaaaaccactccagatcaacctgcctatattatttatacctcgggttcgacaggtaaacccaaaggaattgtgattactcaaaaaaatatttgtcactttttacgtagtgaaaatagtattttgggtattcaagagcaagacaaggtctatcaaggcttttcagtcgcttttgatatgtcgtttgaagagatttggctttcttatttggtaggtgcaacgttgtggattgcaccgaagtcacttgtcagtgaccctgagcggttatgccaaaccttaaagcaggaacaaattacagtactgcatgctgttccaacgttacttgccttatttcctgaagacgtacctaatttaagaattattaatttaggtggggaaatgtgtccggactcactggttgaccgctgggcattacctcatcatcaaatgtttaacacctatggaccaaccgaaaccacggtttctgcaagtcttgagttattagaacgcggtaaacccgtcaccattggcaagcccttaccaaactacggtatgttggtcattaactctgaaagagagttgctggagcaaggtgaaacaggggagttatgtatttttggtccaagtgtggcacaaggctatttaggacgtcctgatttaaccgcagataagtttattgaaaacccttgggcaatgagtgtagaggaagaattactctaccgtactggggatttggctaaaattgatgagtttggtcaagtacactgtttaggtcgtgccgatgaccaagttaaaatccgtggtttccgtgtagagcttggcgagatcgaagctgcgctttgcgatattgatggaattggtacggcagccgttattcttcgtcctgaagacggcattgatcaacttattgcgtttattgcgccagaaattgatgcaaagcaagctatagaaattaaagaactacggcataacttgagtcagcgattaccgccttatatggtgccaaatcgttttgagattattgaagaagttccacgtctattatccgggaaaattgaccgtaaagctttaaaagcaagaccgctcacaagtgtggtagatcgcagtgaatctgaccagccacagaacccggccgaagaaatcctatttgaaattttgaatcgcttgttcccgaacatgccgattaaactcgattcagatttcttcgatgatttaggcgggcattcactactcgctgctgttttaatttcaaatctgcgtgagcatgcggaatatagccatctgaccattcaaaacttatatcaagcgagaagagtaggcgcgattgctgcactcatgttagagcagcctgaacctactttatttgatagccaaattggacaagataaccctcgtaatcagacctataaatggttatgtggtattgcacagcttgtaactattccggttttaatctcgattaatattttgcagtggttagcgccattctttacctatcactactttaccggtggaactcgcgacagtattccgtatgcgattgcgttgtctttattggtgtatgtcagtgtcattatgagcagttttgtactgtcgattacggtaaaacgactattaatgttaggaattggcgcagggcgttatccattatggggattaacctatttccgttggtggctagcagaccgtattagtaatatttcacctgtctatctcttgtcgggttcgactttacttaacttatatttgaaagcacttggtgcaaaaatcggtcacgacgttaccattagttctgtacatattcgtatgccatctttactgactattgaagatggcgtgagtatcggttctcaggtgaatttagaaaatgccaaagttgaacatggccacttggtattaggttcaattcaccttaaacaagacagttatgtaggttcgtatgctgtattagaagaaaatacagtgttagaaaaacaggcccatgtaaatgccttaacttcaattgaatatgacacggttgtacctgagggcgaaatttgggatggaacacctgctcagaaaatagggcatatagatgagcaagctaaattgccagagcgtcctaaactatcgtttatacgtaaaattgctgaatatggatactatggcgttagcgcattaattattgcctgtcttttctttattccaatttttccaagcttccttttggtcgactggttagatgtaaatgtatttaatattaacccgaacaaccatttgcaaatcgcgctttattatttcattttagcgattccggctagtgcaatgatgatgatgattactgcggtgatttcttcaggtttacgtaaaattgcattgccgcgtcttgaaaccggaacctatgcggttcatggcagcacatattatcgtaaatggtttgcggcccaaattttagaaacgagcttacaaaccttacatggcttgtttgccaccatttatgcgcctacatggttccgtatgcttggagcaaaagtaggtaaaaataccgaaatttctaccgcaaccggcgtcattccagaaatgctgactttgggtgaagagagctttattgccgatgctgtaatgctgggtgatgaagagattaaaggcggttggatgtctttaaaagcaaccaaaatcggtaaccgtagttttgtgggaaatagtgcttatattgctgatgggacagtgttaccagacaatgttttaattggcgtgcaatcaaaaacaccagataaccgtgaaatgtatgatggacaaacttggtttggttctccggcgttgctgttacctgcacgtgaagctgctgaaaaatatcctgaccatttaacctttaaaccaagtattaagcgccgtttaatgcgcgggtttattgaagggcttcgtattgtattgccggccgcacttgcgattggggtgggttatatgatcgtgctagacgttattgatgtgattaataactacaatattgagacgggtctggttgcattaacgctcgcaggactgctttatggtgttggctgtttccttattgttgcgctattaaagtggattttgattggtcgctatcaaccgcgttcgacacctatgtggaccatgtttgtatggttaagtgaagggattaccagcctatatgaatcagttgcgattcctaacttcttaaactacttaagaggaacaccaatgttgccattcttcttgcgtattttaggggttcgtattggtaaagacgtttatatggatacagctgatattaccgagttcgactgtgtcagcattggtgaccgtgccgagtttaatagcttctcgggcccacaaactcacttgtttgaagaccgtattatgaaaattgggcaagtaaatgttggcaatgatgtagtggtcaatgcgcgcagtattattttatataacgcaaacgtgagcaatcatgcagtgttagggccattaacactggtcatgaaaggtgaaaatattccggctaaatctgcatggattggttcaccggctgtgccttgggttcacaaataatactttgttgaattgaaaaaagcctctgtagaaacaggggcttttttgtagataacttatgattaacctatttagcttgggcctagtagaggggtgtaattaaattcatgattatctatataacactaaatattttttatacttcagataatattcattatattaaattgattaattttatacttttaaacttagttaatttttgaaagattactattaaacttatataaagactatggttatgagttagaggttgaaaatcaatggaggattctatttctctttttctttgagtgacctcttatccacagtgtaagttggatgaaattatttaaaagtataatttatagaatttttttactttttaacttataataagccgatgttcgcaaaagactaattatggcttctgctggattcgagatatcataatttttaacaaagattgtacactattactatgaatacagatgttgttgagttaaaaaccattaatgaagttggtttaccattagatcctgagacattttctagagtaatcctagattttttagggcgtaaagaaaatttatcttataaaagtcatgataattttattataaatcttgaagatatatctcaatttaatcatattttaaatagtaaaatttcttatcaaaaaaatattattcttgaacatttttcaattaactttggatattcagatggtacctttcgagaaataaatggcagtgaggctttgagtaaatttctggaaacaaggtcgattgatacaactagtataaatttaaattggaaaattattattaagtttgatcacagtcctactatagaaacgcaagagattgatttattatttatttcttctatagagaaaaaaattaatgatgaggatttttcatatatagagctttctataaaccacactaatcagtcatgggccttggatattttaagtgcatttaaggataaaattaatgagattgctataaaaccttcaatattaaaagaaaaatataataaaataacagataacttattttttgcaactatagtgcctatgttttttattgtgttaggtttaggtttaactatccctgttgcacagaatgaaacgcaaagacttagacaagatttagttcaatataatttgaaacagaactataaagatgatttatcaaaagttgttgggcttttaaatattacaactcttgaaagatctgaattaaaagaattaggtactaaaaataaggaaatagaaaagataattgaaaaaaatcaaaaaaatgttgcattacacttaactcttatagttttactttttataattccttttgttgttcgtaaatatattaaatatagtattaattattttaatcataaaagctttattttagtaaataattattctcaaagaaaattgcagaaatataaagatgataaaagtaagataacctatataggatttactgtctttgtaacttcaataacattttctatattggcatccgtaatttttaaggtattagatgctcttgttttttaaatagttaaattaacatactatatcttatacgaaatctctctagctttaaaaatagcctattatcaataggctatttttatttcccctttataaacccccatttaacaataactcactcattatttatccttactttttaatgatctaaattaaaacaaatgtcattttgtgtgcttgactgcaaaagggttgagcactattctttgcctgctggccacattgccagccggctttgacaggctgattcaaacgagcattaaaggttttatacttttagtgtgtacaccctcgtgccccctctgcggcggaacgggagggggacacctttgggtgtgctggcctcgtttgaccagtctgtcaaccctctttcgttctgccaccataattttaatgctttggcagaactcccaataaaaaggagttggctttgcacatccattatttcttggcaagctttgccaaaagctataacgacaccacataagctttaaagcagtttgagggccattagcgctttcaggctttaaatcgtcacaaccaaaaacttagcaacaataaaacttgagatgtgccaagcacagtctttataggctttgctgtgcctttttttctcccaaaaaagtatctcatttacaaacaacaagaatttataacggtaaaactatgccaaatttagttcttccaacacgtgccttatatgttgtaaataaagcaattgatctatttcaccaccggggatttcaccttattggcgtcgacaggatagtgaaagagtcagagattacaaaagccactttttataattattttcactctaaagaacgactcattgaaatttgcctgatggtgcaaaaagaaaagctccaagaacaagtggtcgcaatggtcgaatatgacttaagcactcctgccatcgataaactcaaaaagctttatgatttacataccgatttagaagggccgtattacttattatttaaagccgtttttgaaattaaaaatagttatcccaacgcttatcaaaccgcggtgcgctatagaacctggctaaaaaatgaaatttatagccagcttagagtactaaacgcggatacttcttttaatgatgccaaactatttttatatatggtggagggcacaatcattcagcttttaagctctggtggggtagatgaaagggagagattactagattattttcttggtctaagtgatctaggccgatttcaaatagaaagttaaggtcaatcaaaatacatacaaattaaaagagttatttctataaaagcccgctaatgagggcttttatagattggtttttctagctgaggtagtctctaagaaagcctgcttggccaaatagtttttctcggaattcggcttctaattgttctgtttgcatgtttaacgggtcaaaattttctgctctgacatccagcatatctacaaatgctttagacaaaattccgacccgattgattccaccaaaacctaaataaataccatccttcaactgtttcaaagtgaagttaatatcttttctttttaagatttttatccaatatttaaaaataataggcgtgatgagttttgcaactctagctaaagctacttttctgtttttgctagaatttcctcctatcgcatttaatacatcaaacgcgaccgatttatgctcaagctcctcgagggcatgccactcccacagatttctgctctcttgcgtggtttttgctttaattaacgagtctgtgagtaataggcgagcaagtgtggcggtgtagtgttccatcacgactgtagcagtgacttgttcgactgctgaaagttgacgtaatttatccaagcgtgctttggttttggcctcaatttcgacaacttcaggatagttcgaatggataaggtgattgtttagcgttttatgttcacggctatggaaagcttcttgagcaataaaggcttttatatcttctaaaagtttttcatccttaatttgatttcgaacatttctaatgctttctataaaaaacatttcaccagcgggaaacatcgctgaaagtacaacgaataaggaagtaacaacaggattttcctcataataaaaagagtaacttttatgatgatcgtaagtcagttcaacattacgacgaaaaattttttgatccgattttagagctgtattcatttttttaaactcatctttataaaataattgatcaaattttgatttatactaaaatttatcaatgaatttatacagaaaaaagacggattattagaaggataaaaaattatggtaactataagaaaaccaaaacaaaatagagcaataaatacctttgattctatagtgggtgccggatttatatctgttatgaaaaatggcttggaccatacaacagtacttaaagtgtgtgagatagcaggcgtaggatcggggagtttttatgagtactttaaaaataaagaagcactttttgttgagatgcagcagcactttattgcagaaatttcaaaagttatttatggcgtgattcctgaaattttagatttagagattcctgaagcaatcagaacaatttttttaaaaatcggcgagtttttggcaaaagataataataaatatttttattggctcagtgtttcttctaaatatagtactgaggcaagtcatgtaaaagccgtaaaagcgatcaatgtcttggccattgaatatgctatgaagcatcctgaagtattaaaaatcaaaaatttaaaaatgatggtttatattttgattcattcaagtattgctttaacaatgaacttttttacttctgaaaatatgggttttacttttgaagagttagttgactgcttaattaatattacgatgtcatacatagaagatgatagaaataaagtcgcttaatttacgttcgtcaatttatgatttttagcgcctaaatgtatgccaaattaaaggcttccatctatttatcataaaaacaacaaatagaatgaaagcctaaaatttgaattacaatttagaatgtatttttaataataacgtcgtcgtaagggagtttgcccacgcgtggataaggttctgaagcagatttaccaaccgcaatcattaaacacaccacgtgatcttcaggtaagttaatgagctttgccattgcatcaaagtcaaaaccgtccattggacagctatctaaaccatgctcttgagcaagtaacataagggtttgagcaaagatgcccgcactacgcatcacttcgtcacgttgggtttgtgggcggtcacggtaatactggtcgattgcaccaaccataatatcttgaacttctggagaagctccatcccatacacgtttagcgtcaacttcccatgtatttactttggcacataacacaatcagtaatgatgactctgttacttgtggttggtcccaagcaatcgcgcgaattttttgtcttaactctgcatcttcaacaatgactggacgccaatgctgcaagttaaaagcgcttggtgcatttgctaaaacttcttgtaataactgcttcttgtcatcttcagagagttgaaaagcagggtcgaagcgtttaactgcacggcgtttgcggagagcatcaataacattcataagattttcctacttgagagttgggtagccgtagtcgttagtttttataacgttgggctacttcagccgaagagaagtttggtaataatgtcatacgcgatttttcaaaattattccattgattttcatctttcagcacaggaattgtaattgtttctttacgatcaaaaccaatcagggctgcatcgaccaaatcattgacatccattaatggcggaacttggcttaaatctatacctgaacgttcccaaatttcggttttagtggcagaaggcaataccgcttgaacgtgtaccccatgatcttttaactctaaatgtaaaccttggctaaaaaattgaataaaggatttacttgcgccataaatggtagaaccaaattcaggcgctaagcccagcacagagcctaaattaataatggcgcctttacctttgcgtataagggattgcgacattgcatgagacaatcgcaccaccgcagtcatatttaaagttagaagtttttcaatctcattacgatcttgagttaaaaagtttccgttcagtgcaatcccagcattatttaccaaaatttcaatatcagcatcgtttttgagtacatcttcaattttgcgtatatcttgatcgtttgataaatcggcttgaatgaactcgacctgtacgccgtatttttcttgaagatcttttgaaattttatctaaacggttggtatctcgtgccaccaagattaagtgatagccacgttgagcaaatcgatctgcataaacagaaccaattcctgacgaagcccctgtaataagtacttttgattgaactgacatgtgatgtctccacgctttgatttttagatgatgatcataatctaaaatatatgggttttgatgtcaatcataatcaatgtataataatgacgagcaaggtgaataaaagtgagcgcaccaacatgaaagttagtaaaactcaggtaaaagaaaaccgagataaaattgttgaaaaggcgactcaactgttccgtagtaaaggctacgacggggtgggcattgccgaattaatgtctagcgcaggctttactcacggtgggttttataaacatttcagctcgaaaacagaccttgttactattactgccaaacatggtcttgagcaggttttaaaaagaatagaaggtttaaacttaccccaatttattcaaatgtatgtgtctcgtacacatcgggacaaccgagatcagggctgtaccttaacagcgctatcttgtgatgccgctagacagcccgacgaagtaaaagtcgagtttgaagagggcattgagcagcttattgagttcattatgaatgaacgcgcaaaacaagtttctttagaaacagaagagctgagaaagcaagctattaatattcttgctcagtcagtaggggcaattgcattgtcacgtgcatgcccagaccaatcaaaccttagcgatgaaatcttggagagctgtagagagagtcttttaaaattaaccgattaagtttttttatcttttaagctggtttgactaaactgaattaatctcgctatatcgactgttcgctcataaatgagttctgctgcatgttcgcaggcgtgttctagggtgatggggccattggctagtgaaaaagcggcgcttacgccgtgctcataaagtgcttggtagccttcacctaaagttcctgtaatcacaatgaccggaacattgtgggctttggcaatttggcttatcccaaaaacggttttaccgcttaaggtttgttggtcaaatttaccttcacccgtaattacccaatctgcgttagagattttatgctcaagctgattcagttcagccacaactttaacgccagctttaaagtctgcatttaaataacttttggcggcgaagcccaaaccaccagcagccccagaacccgcttcatctcgtttgtcgaaacctaaaagttgtgccgtgacatcggcaaaatgggcaagggctgcatcgagtaactgtacttgagcaggagaagcacctttttgtgggccaaaaatatgtgatgcgccgtttgggccacaaagtggattggttacatcggcagccagtaaaaaccgtgtgtgctgaatacgtgagtcgaaatgtgttaaatcaattttggataggtggctaagggcaaggccgccagcgggtaaaacgttttggttagcatcgagtaaaactgcacccaaagcactgagtaagcctgtgccgccatcattggtcgcgctgccgcctacagttaaaataatgtcttttgcacccgtgtctaaggcatccaaaataagctggcctgtgccaaacgttgtgctgtggcaggcatcacgctcagacggtggaaccaactgtatgccactcgcttgagccatttcaatcatggcaattttttgtttttctaaccatccccatttggcctgaacaggctgacctaatggtccaaccactgttttttcacgccattgtccatcgcagacttctaaaactgcttcaatggttccttcaccgccatctgccattgggcacaaaatcgtttctgcatgaggaaatactgcttgccatccttgggcaatggcttgagctacctttaaagcagataagctatctttaaatgaatcaggggcgatcacaaccttcataaatgctctaatgcagataaatttttaattgttttatactgcttaatgcgaaaaaaacatagataaagtcgtgtaagtgtcaattttaaaaagctttcagtcggttaaaaatgaaacccaataatgtttttatctgtaaaagatagaattaatatctatttaaatcattgttttgtatttttttatgcaaataacgtggttggcttgaattattgtaattgtaaagaatatggcacatattataagaacggttgagccggcttttagcatagtggcaataatataaaaagtggactctactcatcggtaaacagcgggtagctttgataaaaccataattaaattgtgatttcactgagcctgttgagtgtaaaaaagataagaggatgaaaaagtggataattcagaagaacaaaagcacatacaggaaaataacggttttgcgcgaattgagccatatactcatcctgctggcgggtggggtgcactgctcagtgttgctcgtaacttaaagcgacaagatattttaggtaaaggttcaattaccttactcaatattaaccagcctacaggttttgactgtcccggttgtgcatggcctgaaaagaaagatgctcatgcctttaacttctgtgaaaatggtgcaaaggcggttgcttttgaagcgaccagtaaaaccgtcactcccgaatattttgcagggcataccgttagttggctatcagaacaaagtgactttttcctagaagacctaggccgcttaaccgacccagttcgttatgatgctgcaaccgataaatatgtgcctatttcatgggacgatgcctttaagctcatcgctcaacatttgcatgcgctagaccatccagaccaagcggcattttatacctctggccgtgccagtaacgaagcagcatttttatatcaattgtttgtgcgaagctttggtacaaataactttccagattgctcgaacatgtgccatgaaaccacaagtgttggtttgctcgactcgattggtttaggaaaaggcacagtcaccttagaagattttgatttagccgacgccatttttagttttgggcataacccgggaaccaaccatccacgtatgttaggtactttgcgtgaagtgtctaaacgcggcggcaacattattgcgattaaccctattaaagagcgaggtctcgaacgtttccaagacccgcaagcaccgcttgaaatgatgaccaatggcagtacgccaattagtcgctattatttccagcctaaaattggcggcgactatgcactgatgttgggtattttaaagcacttacatgagtgggataaaaaggcccttgcctcgggcaaaccaagcgtttttgaccgaaactttattgcagtcaataccgttggtttcgacgaaatgattgctgaggtagaaagaacggagtgggcagatctttataagcactcaggtctgtcacctgaacatttagaaaaactggctaaactctttttagagtcagagcgttcaattttctgttggggtatggggattacccagcatcgtcacggaactgctaacgtacatatgctggcaaatttattgttggcacgtggtcaaattggtagaccgggtgcagggctttgtccggttcgtgggcacagtaacgtgcaaggcgaccgcactatgggcattaatgaactccctagcccgaaacttctcgataatattgaccgtgtgttcggtattaaatcaccaagaaaaaatggatatggtgtggttgaaaccattaaagccatggccgaaggtgatatcaaagtctttattggtttgggcggaaactttgccgttgcaacacctgacaccgcttatacacaagaagcgcttagaaaatgtaatttaaccgtacatgtggcaaccaagttaaatcgtagccatttggtgtgtggtaaagatgcgcttattttgccatgtttaggccgtaccgaaattgatgagcagcttcatggaccacaagctattacagttgaagactcaatgagtaatgtccacttgtctgcagggcgtaatactccaatttctaaaaatattttgtctgaacccgatattgtggcaagaatggctgaggccgtgctgccagagagtcagattaaatggaaatggtacattgaaagctatgaccgcattcgtgactcaattgccgatgtgtttgatgaattccatgattttaatttacgcgtttataaacccggcggtttccatttagaacatccagctaatcagcacatctggaatacaaagagtggtaaagcgcaatttctaattacgccacttgaagaagtctatgcggataaagaaaatcagtacgctgctgcatataccgaaagtaaggtttataccttaatgaccacccgttctcacgaccaatacaacaccactttatatggtctggatgaccgttaccgtggggtgtttggtcagcgccgtgtgttgtttatgaaccaagccgatattgatgaagcgggctttgaagcaaatcagtgggtcgatattgaaagtgttttctcggatggtgtgaagcgtattgtgcatagtttccgtattgtgccgtacaacattccacgaggcagcttagcggcttactatccggaaaccaatcctttggtggccttaagcagtcatgataaatatgccaagattccggcttctaaaagtgttcctgtgattttacatcccggaaatgcgccagagcattttaacttggcaacagccgttgaccctgaagatgccaataagaaagtcagcagtctttaagtgaatctgattttttaaaatgaaatttaagcaaaaggcgctctaaacaagcgccattttgaagtaaaggaaataattttgacaccacatgcttatggggttgaaacattgccagtacagcggtttaacaaaaccgaatctgaaaatgtcttagatcatattgtgcaagagtacccaattgccttggtatataacggtatttcgcatgcggtgatgatggcgacaccgaccgatgtcgatttatttgctaaaggttttagtctctcggaaggaattttaaccagcttaaaagagctatatacccttgatgtgcatcaaaatgaactaggcattacggtggaaatgaccatttcatcgagagcatttgccgccctaaaggaacatcgccgtatgatggtaggccgtacaggctgcggtttatgtggaattgaaagcttagagcagtttcagttagacgtgccaaaaattacaacgcatgcatcaaaaatatggcttgagcaaattccgagtgctatttcccatttaaaaactcaacaagaaattactgctttaacgggtggggcgcatgccgcagcgtgggtagttgacggtcaaatcgtggctttatttgaagatgtgggccgccataatgccttagacaaattgctcggttatttagcgcaagaaaattacgacaccagtttaggttttgtggtgatgaccagtcgggcaagttatgaactgatacgaaaatgtgctcagctcaatattagcttgcttgcttcaatttcagcgcctaccagtatggccattcagttagccaagcaatcgggcctgactttggcaagcttttgtaggggcgatggatttgttttatatacggaaatataaaatatgtcgtttaatatgagtgaattagggctgggttcattcgatattcctttcacttttaagctaaggttagtttttatagattattataaaattctaaaggttcagagtctgtccaaatgtcttgggtacaatcaataaaagaatgggcaaaacgtctaaaaaaacaaattattatgctttggtttgcctcaaggcatcctcaaatgccgtggttacccaaaattattgctgtggtagcggtggcttatgcgtttagtccaatcgacttaattccagactttattcctattttaggcttcattgatgacgcggttattttacccatactcatttggttagcagttcgttttacgcctcagcaagtcatttttgatgctgaacaacaagctaaagaatggctagatgaacatgaaaagcggccaaaaaactatttggttgccgtacttattattttaatttggctcacacttgccgtgatggcttacttttattttggcggtggtttgtaagtgaactgagtcttgaaaccctgtgcgaatttaatacccttaacattgtactttgccacaactcaaaggataataacgtttttataagctatgggttgcagaccatgaaaatcgtcgcagatgaaaatttggcgtttaccgattactttttttcagagtttggcgatattcaatataaagcagggcgcaccttaacgcatacagacgtacaagatgctgaagctttattggttcgttcagtcaccgcagtaaatgaaagtttaattcaaaataccgccctaaaatatgtgggcagtgccacaatcgggaccgatcatttagatattcaagctttagaaaagcagggcattacatgggccaatgcagcaggttgtaatgcacaggcggttgctgaatatgtcattacagctttactgcatttagatgctagccttttagaacaacaagaaaaatttacgctaggcattgtggggcttggcaatgtcggtaagcgcttggcctatatggctcagttgcttggttggaaagtgattggcttcgacccctatgtacagttagattcaattgaaaatgtaagctttcaaaccttgttgcaacaagctaatgcagtttcaattcatgtgccgctgaccaaaaaaggcgaacatgcgacatatcatctgtttgacgaaaaagcttttgcagcgcttcaaccgaacacgattttaattaatagtgcacgtggtccggtcgtaaaagaagccgctttaatcgaagacattcaacgtacccagcgtaaagtggtactcgatgtatttgagcatgagccagtgatatctgaagagcttttaaatatgttggcgttggcgacaccgcatattgcaggttatagcttggaaggaaaagctcgtggtacgcaaatgatttatgaagcgttttgtcaaaaatttggatatgacattaataagcgtttcgaaacccagttgcctgcatgtgaagactatttttcaggacatgatttaaaagcagtgttaaagcaaaaactatctcaaatttatgatattgctcaagatgatgccaacatccgtgcctgtgttaaagagggcaaggtagagcaaaaagcatttgatttattacgtaagaattatccgctgcgccgtgaatgggcagctcacgggggaccacaggcatgagtttaagttatcaacctacttgttcaattgatgccttaaaggctcgtgccaagctttatactcaaatccgtcagttttttgcagaacgtgaagtcatggaagtcgaaacaccaatcgtttcacaagcaggtgtgactgacgtacatttagcctcagttcaggcgttacgtcatatcaatggcaaattgcagactcagtatttacagacttcgcctgaatttgccatgaaacgtttactggcaagtggcagcggaccgatttatcaaatctgtaaggttttccgagacgatgagcacgggcgcaaacacaacagtgaatttaccatgcttgaatggtaccgtccgggtctggacttaaaagcgttaatgcacgaaacagccgatttattacaaacctgtttgcagcatcgttttggcgaagttcgtccatttattttaagttataagcatgcttttcaggaccgtttagatattaacccgttgcaagcgactttgaagcaacttaaagacacagcaaatcgtgttgggttaaatctcgacttgggcgatgaccgtttagcttatatggatttgttgttttctcattttgttgaaccaagtttagggtttgatgcacctgtctttttaactgactttccaccagaaatggcatctttagcgaaagtgaaattagatgaagatggggaagaggttgcagcgcgttttgaggtttatatcgaaggcttagagctagccaatgcttacgatgaattgctcgattcagacgtgttgcgttctcgctttgaagcagataatgcagagcgagctaaacaaggacttcatatcatgccattagatgagcacttgttagcagcattgtctcatatgcctgaatgttcagggatcgctttgggaattgaccgattactcatggttgcaaccgatcaacttaaaattgaaaaagtcattgcttttccagccgaaattgcctgaaaacaacgaaataaaaaagcacaataatgtggctttttatttagaacttatttaagttaggcttgttgaatacctgcaacaacccaatcttgctgtgaaccaacaggttttacaaagtgccagatttcagtaaatggctgtggcaagctgtttaaatcttcacttactgtacctgtgaaacgtacgctcacaatgtattgaccattttcagtcgcactgtctacaaccattgcatttaagttactaaactcagcaacgtcctgatcttggttctccatgatgtcgttatacatagagttataaagttcaggggttaagtaacgacgaatttcttcaatgttacttgcactattgattgactgaatgtggttaaaacgctgacgggcaacgcgtaagaaagaagcaggctcactaccatctggtaattggttaccgctattcgtcgttgcgctaccaaaaggagcttgtgttgctgcaccgccacctacagattgaccaaagatattggtattatcacctgtattggttggagctgccgagcggccaaatgggttttgaccgccattatttggtgcataagggttattagctgctaatttttttttgatcccaatttacggaatacaaagaaagctacagcggctgcaagtaagacccaaagccagccaggaataccaccttttttctcttcttgggcttgaacagcttgttcattaccaggttgagttacttggtgttcagctgatgttgatttgtcatctgctaaagcatttgctgcaacagcacctacggcagcaccagccacaccagcggcaaccattgaaccaacacctggaccagatctctgaggtgctgtagcaggttgttgaactggagtcacttgacgaggttgttgataagactggcttgaagtagtagaacgtgccataccgtggcttttaccaccacctgcacgtttagcttcagcaagcggagaaattgctaaagcagccattaaaataccggtaatcaagccacgctggtgtacttccataggaaattcctgtttaaagttaatttgtaatagtatttatgcaggtatttactctaaatttcaaccttaaaagtatgtttttttatgtcaattcatcactgagttgcatcgcctcagtcaaggcttcatgcaggcgggcaacagcaatcacttgtacgcccggaattgctttttgcggggcattacctcttggtaagatgacgtatttaaagccatgttttgctgcttcttttaaacgttcctgaccattaggtacagggcggatttcacctgaaagcccaacttcaccaaaaactgcaagctgctgaggtaaggcttttgttcgcaaactcgaagcacatgcaagtaaaacagccaagtccgaacctgtttcggtaatttttaaaccacctacaatattgacatacacatcttgtccggtggtttgtacacccccatgacgatgcataacagcaagcaacatgtttaaacggttttgttcaagaccaagtgcaacacgtcttggttgtccttgagcatcatcgactaaagcctgaacttcaactaaaagtgggcgagtgccttcacggctaatcatgacaattgaacctggaatggcttcgtcataacgacttaagaaaatagcagaagggttagccacttcacgtaagcctttatcggtcatgccaaatacaccaagctcattgactgcaccaaaacggtttttcactgcacgaatcattcgataacgtgagtctgattggccttcaaagtaaagtacgcagtccaccatgtgttctaaaacacgaggacctgccaatgcaccttctttggtcacgtgaccaacaataaatagcgctgtgccactattttttgcataacgggttaataacgcagcagattcacgaatttgtgaaaccccacccggcgcagattgaagcgtttctgtgtaaagcgtttggatagagtccaaaattgcgacaacaggacgttcttgttctaaaacttcacaaatgcgttcgacacaagtttcagccatgacttttaactggtctgttggtaggtcaaggcgttgggcgcgtaaggcaacctgtgacagcgattcctcacccgtaatataaagtgcagaactttttgcacttgccatgtgagttgctgtttgtaaaagaatggtcgatttaccaatacccgggtcaccaccaatgagtactacagaacctgtcaccaagccaccgccaagcacgcggtcaaattcgctaatacctgttggtaaacgggtttcatgagaaacagagactttattaagcgttgtaatattggcgacttgacccgcataacccccaactttaggacgtgcacgatgagcagtagtgggttctagtttgacttcattaagacaattccattcaccacactctgaacattgacctgcccattttagatgatcggcaccacattgctcacaacggtaaacggttttgactttgctcatattcgacttcagtgagataacttcataatcattaaaagcagagtatagcaaaaagcccaatagagaacttaatcgatatggaatacattttgcttaagcttcggtgagcaaaattaaagagtaaatgtcatgttttaaaaatagagagataacgtagtactcagtcaaatttcgagaaagtattagaagctcgagagggaattgatagttaaaaagttgatcaattgatatggctttttaatttaaaaatcaaagtggttcaagtcttaattttagactgaaaagtgcgttgtattgctaggttcttgtgcgtattatcggatttaattgtatgtatcttgaaattatcagcaatacagacaaaaattggttagctgaaaagttgtcaaaaaatatacatttaaaagatacctgcaaatggtgcgatatcgtctttttgatttgattttagctaacggactaaaaaaattactggagtgtattcataaaatgtcgaatcaaaatctgagcgaccctcatgaacaaggtgagctccatcgtagtctctctaatcggcatttacagctgatcgcgattggtggtgccatcggtaccggattatttatgggttcaggtaaaactattagtcttgccggaccttctatcttatttatttatatgattattggtttgatggtgttttttgtcatgcgtgcgcttggcgaacttcttctgtcaaatttaacctataaatcatttattgatttttctaccgatttaattggcccatgggctggttacttcgtgggttggacctactggctgtgttggatcacgattggtatcgccgatctgtctgcaattatttattacttacagttcttcaataatggcttacctttctcgcctgttgaaggcgcaatgattagtgttgccgcgattgtgttcattatgggattgaacttactaacagttcgattgtttggtgaattagagttctggtttgcacttattaaaatccttgcgattattattttaattgcagtgggtctgtggatgatctttacaggctttacgtctactacaggtgaagtcgcttcatttactcatctttgggcaaatggcggtttcttcccaactggtgtgcatggcttcttggccggtttccagattgcaatttttgcttttgtgggtgttgaacttgtgggaacaacagctgcggaaactaaagaccctgagcgtaatttgcctaaggcgattaactcaattccaatccgtatcattattttctatgtattggcgctactcattgtaatgtcagtaacaccatggaacagaattgatccggcgatcagcccatttgtaaacctgtttagtcaagcaggggtagctgcagccgcgattttgatgaacttggtagtattgtcatcagtcatgtcatccatgaacagtggtgtattctcaacaagtcgtatgttgtttggtttatctcgtgaagatcaggggccaaaagcttttggtaaacttaacagacgtgcggtaccagcaaatgcattgtatttctctgctgcgtgtttattgttaggtgcagcattacagtattttgtaccaaatacagttgaagcatttacgcttgcaacaacactttcaacgattctcttcatctgcgtgtggttgcttattatctggagttacatccgttattacaccacgcgtcctgaactgcatgccaaatcaacatttaaattgccgggtggcttatttacatgttggatcacgattattttctttattggtatgatttacgtattgtctttagagccagacacttttaaagcgcttaaagtcagcccaatttggtttgttattttgatcattggttatttcttcttctataaaccacgtcataaaaaataattaaatttatttggttatgatcaaacgctggctgaaaagctggcgttttttatgcatattgtttttctattcaagtttactctttagccgcttgcctgatcacggtatactgcatcgaattgtttaaatcaggtgctcagatgcgtcgtgtcatttgcctcatcagtttattgagcagcagtattttgcttagcgcttgcggtcagtcaggagcattgcagctaccttctgatccaaattatgacaaacgtgcaaaatacttgctctatcgtaataaagaacagaaacaagttgtgcaacaagatgaacaggctgaacagtcagtcgaatcatcagcagctcaaccacaaactacatcaccttaagctttgaaataaggacaccttcatgagtttcacccgcattaatggagtattgcatgcagagcaatgttctctagagcagcttgcgcagcaatttggcacaccgttatatgtttattcaaaagcagcttttgaaaaacattatttagatatggatcgtgcctttgactttattgatcatcaaatctgttttgcggtgaagtcgaactcaaatatagctgttcttaatgtcttggcaaaacttggtgcgggttttgacattgtgtctggtggtgagctagcacgtgttttaaaagcaggtggcgatgcttctaaaattgttttttcaggtttaggtaaaactgaagctgatattgaaacgtcattaaatgtaggtattgcctgttttaatgtcgagtcttatgcagagttggaccgtattcaaaaagtagcagctcgcctaggcaaaaaagcgcctatttctttacgtgtaaatcctgatgtcgatgcaaaaacgcatccttatatttcaacaggattaaaagaaaataaatttggtattccaagtgatgcagtttatgaaacctatcaatatgctgcatctttacctaaccttgaaatcgtaggtattgattgccacattggttcacagctcactgaaactaaaccatttgttgatgctttagaccgtgtcattgtgatgattgatgagttgaaaaaactaggcattaatctaaaacatatcgatatcggtggtggtttaggggtttgttataaagatgaaacaccgccaagtgttgaagaatatgcaaactctatgaagccggctttagaaaaattaggcttgaaagtttatatggagccgggtcgtagcatcagtgcaaatgcaggtgtacttttaaccaaagttgatttgcttaaaccaacgacgcatcgtaacttcgcgattattgatgcagcaatgaatgatttaattcgtcctgctttatatgaagcttggatggatattcaacctgttgtaccacgtacagataccgaagaaaaaacttgggatttggttggtgcaatttgtgagacaggtgatttcattggtaaagaccgctcacttgcattacaagaaaatgacttgttgactgtacttggtgccggggcttatggttttgtcatgagctcaaattacaacacgcgtggccgtgcagcagaagtcatggtatcaggtgaaaagagctatttaattcgtgaacgtgaaacggttgagtcgctttgggaaaaagaacgtttattgcctgaggagtaaatgagatgttattagaatttaccaaaatgcatggtttaggcaatgatttcatggtggttgatctaattagccaaagagcttatttagatacagcaacaattcaacgtttggcagaccgacactttggtgtggggtttgatcagcttttaattgttgaaccaccagatgtacccgaagctgattttaaataccgtattttcaatgcagatggttctgaggttgagcaatgtggtaatggtgtgcgttgttttgcccgttttgtccacgaacgtcatttaaccaataaaaccaacattaccgtacaaaccaaagcgggtattgtaaagccagagcttgggcaaaatggttgggtgcgcgtaaatatgggttacccaaagtttctgccgaatgaaattccatttgttgccgaagagccaaaagctttatatacccttgagttggcaaatgaccaaaacattagtattgatgtggtcaacatgggtaacccacacgcggtcactatagttccagatgtactaaccgcggatgtagctggtattggtccgcaagttgaatcacataaacgtttccctgagcgcgttaatgctggtttcatgcaagtgattgatgacaagcatgttcgcttacgtgtatttgaacgtggtgtgggtgaaacacttgcgtgtggtacaggagcttgtgctgctgcggtaagtggcatgcgccgtggtctacttgcgaactctgtagaagttgaacttgctggtggtaagctacaaattgaatggcaagaaggcgatgtggtctggatgactggtccaacaactcatgtatatgatggacgtttggatttacgttatttccaaggttaatcgcatggcctaaatagaagcctcttttcatcagttaacgtgataaaagaggctttcttttatatgtacaatattttttgattttattaccttttactcaacgccaatttcaaagcaaatagaacaaaaatactgcccgtaattcggtccatatattttacaaacttgggttgctttagatagcgcgaaagtggctgcatagccagaattaatagacttgaccataacacgccaatcaccacatgaatcattactagccccatcacccaagtaacagccgatgcttgcgctggaatgaactggggaagaaatgaaatataaaaaatgccaacttttggattgagcaagttgccaaagaaacctttaataaaccaattctctgaagtagagcgatttgaatgattgtcttgtatatctgcgagctgactacgaggttttaaaatcatatttaaacccagccatgctaaataagcggcgcccatccatttcaatatattgaatgctaagtcagatgccatcagtagggcacctagaccgcatgccacgacaatgccccaagcaatacagccaagactaattccaagagctgcttgaaacgctttagactttccttcaagtgttgcagtacgaataattaaagttgtatctaaaccaggggtaagggtaagtaaagtaatggcaattaaataaggaatgagtatggtggtcatggtgtaaggtccaacggatacttggtataaattgtaatatataagttagattcattatgctgtgcgatatcaaattttcctgattaaatagtttttggtacactcaaaaaaatgggcaaataaatggagagcaatttggattttgcattacaactgctctcaatgtggttaaaagaaagaaaaattcaaaaccagtctgagcatacaattactgcttatgagcgagatgttaaaagcttccttgagttttgtgagcttaaaaaagttgatttaagaaatgttgaagcttcagatttacgtgaatatttggctcaacgtgtcgaacaggaccagttaagttcaagtagcatgcaacgtcatcttacttctattcgtcagtttatgaagtgggctgaacagggcaaatacctagaaattaatcctactgacgattttaaattgaaacgtcagcctagacctttaccgggcatgattgacatagaaacggttaatcaaattttagatcaacccatgcctgaaaaaccagttgatcagcagctttggttaagagataaagccatgttggaactactgtactcaagtggtttacggctcgctgaactgcaaggcttaacgattaaagatattgattttaatcgtcaactcgttcgtattacaggtaaaggaaataaaacccgtattgtaccgtttgggaaaaaggcaaaagaaagcttattgaattggctaaaaatttataatatctggaaaggccattttgaccaaaatgcttccgttttcatttcacagcgaggcggtgcattaacccctaggcaaattgaaaagcgtgtaaaacttcaggcacaaagagcgggtgtaaatgtcgacttacacccacatttacttcgacattgttttgctagtcatatgttatcaagtagtggtgatttacgctcagttcaagaaatgttaggtcatagcaatttatcgactactcaaatttatacacatattgattttgatcatttggcccaagtgtacgatcaggcccatccacgagccactaagcattaagccgctttaactggaataaaaagcagaatgtagagatcatttgtatttttttacaaatttgtttaaaagaaatcgatgaaattacccaattgaccattttgatctttgcacattttgtcggcatatatagtctaaaaactataaattttgactcatttttgagagtcttatccctctgactaataaggtaaataagataaaaagataataaaaatcaatgtataaaatagactttaaaaagaataaaataggagttagatatgtataaaatttttttatgaactgatgatttcattttttttgccccgttccagaaaattgtgacttgaccgaaatgccaaacacattgcaagatagggtacctaaaaaattttaatcgaagagttaatatacttttctcaacatttacttttgctagaacagccgaggattacatgaaggctcttgttgctgtaaaacgtgtggttgatgccaacgttaaagttcgtgttaagccggacaatagtggggttgaccttaccaacgttaaaatgtcaattaacccattttgtgaaatcgcagtggaagaagcggttcgcttaaaagaaaaaggaacagtatcagaaatcgttgttgtttctattggtcctaaagaagctcaagaacaaatccgttctgcaatggctttgggtgcagaccgcggtattttagttgaaactactgacgaaattggcgctctagaagttgctaaaatcttaaaaggtgttgttgacgctgaaaaaccagaacttatccttcttggcaaacaagcaattgatgatgactctaaccaagtaggtcaaatgcttggtgcattattgggcgctggtcaaggtacgtttgcttctgaagtgaaagtggatggcggtaaagtacaagtgactcgtgaaatcgacggtggtttacaaactgttgaacttgcacttcctgcaatcattacaactgacttgcgtttaaacgagccacgttatgctgcattgcctaacatcatgaaagctcgtaaaaaaccgcttgatactaaatctcctgctgattacggtgtaacagctggtacgaagcttaaaacgattaaagttgaagcgcctgcagaacgtaaagctggtgtacaagtgaaatctgtagatgagcttgttgaaaaattgaaaaatgaagcgaaagtgatctaatacggaaggataaaatcatgagtattttagttatcgctgatcacaacaaccagacacttaacggtgctactttaaacgttgttgctgcagctcaaaaaatcggtggtgatattactgtattagttgctggttcaggcgctcaagcagttgctgacgctgctgctaaagttgctggtgtgagcaaagtattacttgctgacaacgctgcttatgcaaaccaattagctgaaaacgtagctggcttagttgctgacttggctaaaggttacaaatacgttttagctgcttctacaactactggtaagaacattcttccacgtgttgctgcgcttcttgatgtaagcatgatcacagacattatttctgttgaatcggctaacacattcaagcgtccaatttacgctggtaacgcaattgcaactgttcaatctgacgaagcaatcattgttggtactgttcgtggtacagcatttgatccagttgctgcggaaggtggttcagctgctgttgaaacagttggcgaagtaaaagatgctggtgtttctaagtttgtatctgaagaaatcgttaaacttgatcgtccagaattaacagctgctcgtattgttgtatctggtggtcgtggtgtaggttctggtgagaactaccacaaagtacttgacccattagctgacaagcttggtgcagcacaaggtgcttcacgtgcagcagttgatgcaggcttcgtacctaacgacttccaagttggtcaaactggtaaaatcgttgcacctgagctttacattgctgtaggtatttctggtgcgatccagcacttggctggtatgaaagattctaaagttattgttgctatcaacaaagacgaagaagcaccaatcaacagcgttgctgactactggttagttggtgatttgaacgctgtagtaccagagttggtatctaagctttaatctttattgattaaagttaaaaacccctagttttgaactaggggttttttgttttagagtctgaagttagaagtaaaaattagaaaatttaagctttggatgtttgatttttataaaataaaattcacatagttttgattaggcatgaagataatgattgcagctaaaagagtagaataatatgcaattaaattatacaaatatcaccagattggcagtgtagattccgcacattacagagcgcttttatgctatagtatacagctatatttttttcgattttagttcactttccggaactaaattttttgcaagatcaagacatataaacggatagaaatatctatctgtaagaaggagtatgcatgagcgtatcggaaatccgaccgattgccattgaggacgaactcaagcattcatatttagattacgcgatgagtgtaattgtatctcgtgcattgccggatgtgagagacggtcttaaacctgttcaccgtcgtgtgctttatgccatgcacgaattgggcaatgactataacaaagcctacaagaaatctgctcgtgtcgttggggacgtaatcggtaaatatcacccgcatggtgacttagctgtttatgaaaccattgttcgtatggctcaagactttagcttacgttatttattggttgatggtcagggtaacttcggttcgatcgatggtgatagcgctgcggcaatgcgttataccgaagtccgtatgactaagctggcacatgagcttcttgcagatttagaaaaagacacagttgactgggaagataactacgacggttcggaacgtatccctgaagtacttccgacacgtgttccaaacttgttaattaacggtgctgctggtattgctgtaggtatggcaactaacatggcaccacacaacatgacagaagttgtgaatgcttgtttggcttatgctgacaatccgaatatctcgattgaaggattgatggaatacattaccggccctgacttccctacaggcggtattatttacggtaaatcaggtattgttgatgcctaccgtaccggtaaaggtcgtttacacattcgtggtaaataccatttcgaagaagatgaaaagacaggtcgtacaaccatcgtctttactgaaattccatatcaagtaaacaaagcaagagttattgaacgtattgccgagttagtaaaagagaaaaagcttgaaggtatttcagaacttcgtgatgagtctgataaagaaggtatgcgtattgcaattgacttgaaacgcggtgaaaacgcagaagtcgttgtaaataacttattcttaaatacccagcttgaaaactcattcagcatcaacatggtttgtctagacaatggacaaccaaaattgatgaatctaaaagatattattgcggcatttattcgtcaccgccaagaagttgtgacacgccgtaccatgttcgaattacgtaaagcacgtgaacgtgggcatatcttggaaggcttgacagttgctttagccaatattgatgaaattattgaaaccatcaaaacttctgcaaaccctgctgaagcgcgtgagcgtttacttgcgggtgagtgggcaggtggtggcgttgttgcactacttgaaaaagctggtgcaatttctgttcgcccagatgaaattgaaggtgaagatccaaatcgtccatttggtttaagtgattcaatttatcgtctgtcaccaacacaagtaggcgcaattttagaattacgtttacaccgtttaactggtcttgaacaagacaagttacatgcggaatatactgaaattttaggtcaaattgctgaacttactgcaattttaaatgactttaacttgttaatgggtgttattcgcgaagagttggcacaagttttacaacaatatggtgatgcacgtcgtaccgaaattgttgaatctcgtgtggatttctgccgtgaagatttgattcctgaagagcaagtggtattaactgtttcacaaacgggttatgcaaaaactcaaccactttcagactatcaggcacagcgccgtggtggacgtggtaagtctgcgacttcaatgaaagatgatgactttattcaacatctgattgtggcatcgaaccatgcgaccgtactttgctttaccaacgtgggtaaagtgtaccgtctgaaagtttttgaagttcctcaagcatcacgtggggcaaaaggccgtccaatcgtgaatttgttaccactagatgcaacagaaaccgtaaccgcaatcttgccgttaaccgagttcccggaaaaccactatgtgtttatggcgacagcttctggtacggttaagcgtgttgagttagaacaatttgcaaacattcgttcaaatggtctacgtgctattgaacttaatgaagaagataccttaattggtgttgcgattactgatggtaatcagcaaatcatgttgttctctaacgaaggtaaagcaattcgttttgctgaaactgacgtacgtgcaatgggtcgtacagcgaaaggtgtacgtggtatgcgtgtaagctttgcaagcagcaccttaagtgaagaagatgcagatgttgaaaatgatgattcagatgataatgatgattcagcagattcaagtctagtaagtcgcatcgtatcgcttgttgttgtacctgagacaggcgaagtactgtgcgcgagtgccaacggttatggtaaacgtactccagtaaatgacttcccgaccaagaaacgtggtggtaagggtgttattgcgatcaagacaagtgaacgtaacggtgagctagttggtgcagtttctattgatgaaaccaaagagttattattaatttctgatggtggtacgcttgttcgtacgcgtgctgcagaagttgcaatgacaggccgtaatgctcaaggtgttcgtctgatccgtttaagcgaagaagaaacgctcgttggcgtagtttcaattgaagctgtagaagacgaagaagaacttcttgaaggtgaagtagatacgactgaaactgatagcgaagaagctgtatctaataatgaagatacttctgaagagtaaaacgttttaaaataaaaaaaggaagcttcggcttccttttttatttctggtttatttcgagggatggaaaataaacacatcatagtttctgtaatgcaaagtttttactgacgggtctttagttgcaaaattatgaggttgacttatcacgatcagatcttgtttttgcattagagcatcttgaagctgctgttcgctccacaagtactttttgagttgcggttcaaataacaaaccatctttaatttctaaagaggcactatctgaatgtacagtatcccattggtttacgatataaacgggctgcttaagttttaaaaggaatggaacatcatagaaataataattgtagaaaacgatttttgtagatggggcaatgtactcagcaaaatctgtttggcctacattgtttttggtatctaaaatacgaacagcaaatgggactgcactacatagaacaattaaacttataaaaatataggtcaaatatttcaatttctgttttttatatagcccaactaacacaagtggaagcacaattaataaggcaccaatgagataaataaatatggcttggttttggaaaaaaggctgatgtgcacgaataaaatgtggtgttgcactaacgccaattccaacaagtatagtaaatacaggaataccccaagtctgcaatctggttttattactgctttcaagaaccttattcatcacaagcgcgaagaaaatggcaagaggcggaacagcaggtaaaatatagcctgctagcttagaaggcggaatagagaagaaaaccgtaacagaaacaaaccaccatacaaatagggcaagtaaagagcatgatttataatctttaaaaatggtttttatagacgtaaatctactcgcaaaaagccatggtaaaaaactgacaaataaaataatcagataaaaacaccatggctgtttgttattaaactcttttgaactaaaacgattaaattgttgatcaataaaaaaatagtgtaaaaattgaggatatttactttgtactaagtagagccacggactaacgatgagtagaaataacaagatagccaatggattaagaagagaaggtattttcttccattgcttggtgtaaattaaccacggtaaaagaatcatcccgggaattaaaatcccaattaaacctttgcttaagaaggctgctgcaccagcgatataacctaaaaataaaatagatttctgtgcagaaatggtgaagtcaacaaaacataaaacactaatggtgatccaagaggcgagcagtaaatcatggttaatatattggctactaccaaaaaaaagcaggttagtggctaaaataataacggtaagttgtgcaacgctttctgaaatatgcttttttacgaataaaaataatcccactaacatgagggtaccagccaaaacaggtactaaacgtaacacccatacatgcacaccaaaaagctccataaacatagaacttaaccaatgtagtaaaggaggcttatgcatgaaaggtaagccatcgattcgtggagttaaccagtctccagattcgaacatggtacggctaatatctccatagcgaccttcatctggtacagataagggtctaatccaagacaaaacaaatagccaaatcggtaagaatattaataaaaatttggaactacgaagccattgctgcatacataatccttaatgttggaatgcaaaaaaacggttaagtaaaaaagtcaccatagatgtcagaacaattgcagtacacactaaggttgaaacaggtacgttaaaatagaggtttgaaagtaaaagaaaactttcattaaataaaaaacctaagccagcaaccaacgtgaattttgggagagtctgccgatgcgtaagatgttgcgctttaaacgtaaaaacgcggtgcccaaaatagctcacccaataggcgagaagaaaagccaataaattggcatattgcagtgcaacatgtttcttaaatagaagcatggctacactataatgagtaagtgctgctgcggtccctgtagtagtaaaccgtgcaagctgaagaatatgagtaaacattagaaactagagaacgtattttcttggtgggtgattgaatgttcctgcttagtacgagaatgttcggtagaaataatatattttgggcggtttttaacttcagcataaatgcggccaatgtattcacctaaaattcctatgaataacaattgaatgccacctaatagcgtcatacctgccgcaagtgttgcccagcctggaatggaaattccctcaatcaaagttttaatgataatccatacgccgtagctcatcgcacctaaggctagaattgcacctaagtaaatacatacgcgtaaaggtaaatcagaaaaacccgttaaacctgacatggctaagttaaaaagagattttaagttgaagctagaacggccatgttgacgttcttgctcagaaaaattaatgcctatacttttaaagccaacccaagcatataggcctttcatataacgatttttttctggtaactgtttgatggcttcaacaactcttgcatcaagaagtcggaaatctccagcactttctggaatatcaataggtgaacttaagtttaaaatacggtaataagcttgggttaaaacacgtttaagccatgattcggttgtacgattacgaataccatagaccatgtcataaccatttttccaaagattaatcatggttggaattgcttcaaatggatgttgaaaatcagcatcaatcagtagagcaacttcaccagtcacatggtctaaaccggcacttaaagctgcttctttgccaaagttccgtgaaagctccagcacaactaaaggataatcctcaatcattgtttgtaaaattggaatggtatcgtctttacttccatcatctaccacaataatttcatagctaagattttgctgttttagactatttgctaaagcaggaataaaggtttttaaattctctgcttcgttgtaggctggaacaacgcaggataaaaagggttttatattcattgcattgcccctagtctggtgagctggataccgtattgttgacaatcaagttggaactgatccgaactgaagtattgatattcttgaattcgggcgtgttgaattggatcttgatcctttgattgtgcaagtgctggatggcacataatcagtaaatggtcttttgcattcgcaagccaatattgattgagttggccataattggtcagtttgaaatcatagatgccagcaaattggccattttgattaaagtgatatgtctggcaagcttttgccaaagagttagaacctaatgctgagagcatacgagttttaaaacggtaatgagggggattgatcggctgttgtaaatttcgaatccaacccgtaaattttttctcttttagtaattgcagcaaaatatcacgtataaatggaaattgatgaatatgttgatgaccatctataaagtcaggttgttttcctaatactgaaacaaataagtcccattgctcctcaatacattgagtgattaattcgcgattaagacttgcagaccatgctcggactataagcataggtaagggaaaaaccagattacccgaagcgaaagtatgggtaagatttaaatgtaaaccgatatcaactcgatcactaaacggttttaatttggcagcagcagtttcccataaatcagattgggtcatacatgaggtggcttgaagcgcaccttgttcaataagttgaataattgcgtcagatatttctgcattcattgcaaagtcatctgcgcaatagcacacctttgccatatctaaattccaccatagggcagggttacagaattattctgcttagctgctgaaaaactatacgtttttaatatggagaaatttccttaattccaacttaaagttttcttaaggttttatgacaattgatgtaaattaattatttgaatttatttaattttttataaaatttaagtcaatttttttaagaaataagctttaactataagattttatagtaaataaaaatataatctgtacactttgattagcctataaataagtttatttaaatacttttaaacgtgaataggcagtaattaaaaatataaccccaatagtcgcaagaaaaattaatttcgggaccacgacatttaaaggcacgcccatttgattaagttgtacaaacatctgtacgccgtgtgtagagggtaaacaccaagcaaaccattgcaaccattcaggcatggcttgatgaggccaggcggcgccagttaataagaaaagaggaactgagctaaatacaataatatgtccggcacgttccggcatatctaaaagtgagccaatcagcatacctaatccaattacacagctaataaaaataggaacagcgactagcaaaccgacaaagtttccaccgtgtggatagtcattgaaccacaaggtaaaaccaaaaagataaaaacttcctaaacaaccaattgtaaagatactggcaaaaattcctgcaaaacgaataggggtaattttttcatgttgttcgcggtaacttgcaaccagcatggccagtcctaacacaattgtttggtgaataataagtgatgcaactgcaggaaaaatataactaccgtagcctgaaagcgtattaaataaaggcatttggtgaatagaaagagcaggctggaagtgtgtacgttgtccaaacctttcaatatattcctttaaggttgcttcaatagaagtggcaagacctaacccaatttctttagtttttaaaaagttggttgtgcttaagtataagccgattccgccagtttctccgcggcgtaagctcttcgttaaattgcttggtaaaagtaaaataccatcggctttttgttcgcgaaccatttgttcagcttcaagaaaattagcagtgacatcaacaattttaacgtgagggctattggctgtttgaccaatgacttgagaagttaaaagactttgttcttcatcaacaatgacaattggaattgattctgcgcgctcagctttataggctgtcggataaaaaaagctataaagaatgacggataaaataagtgttgtgaaaactgaactgttactcacaatatctttaaatgtttgaacgtaagcctttaaaaattccttcatgatgttgctccttgaaccagttttttaagcagcaaacaacttaaaaagaaataaataaggcagtagccaataagtattaagaagggagacatcgaaatgaaaagtggacttccaatcacccattgttcggtctggagctttgcataaggggtgtacggaataatcagtgaccaaaatttagtgaaaatcggtgcattatttaaaggtagagtaacgcctgcaaaacttaaagaagatccgccatatactgcaataaaaccaaaagttttacttaaatttttggtcgcgagaatgacggtactactaattaaagcataagaaaaataaagtaagaactgagcagctaataagaaacttagtgaacctgctacaaaccagcctcgaatttcaaccagccaaaacatccataaccaagtccagaaacagaaaataaagctatacagcaaatttttagacaataagccttgaataaaactctctcggttcacccactgtgttagtgtgccgcgtttaatttcttgtccaatagcaaatgccacacagcaacatagtaataaatgtaatacggctggaaccatgaagggttctaaatagaactcatagctcatgcttgggttataaagcgttgaaattttgacgtgtgctgtaggtacatctaaatagggaatattatttgcaagataattctggccagcatagtctgctaaagcattgagagtgctgactaacatcgccgaggaaatcgtgttcccgacactaaaaaaagattggttaaaagcaatactgatttgcgcatcttgagctttcacaaaacgtttttcggcaccatccggaataaaaatataaccccatattttggtttcattgagtaatctctcggcttcacttgagcttgtagtaattgtttttacatcgactgtatgatttagcgaaagatactttccaatattacggcttagttcactctggtcttgatcaataatggcaatgggtaaatgttcagctttacctgcataaaacatgctgctaaacaaaaaaatgataaaagcagggatgagtgtcaccatacacaaatcccatttattgcttcttaaatattttagttcacgtaatatgctggcaaacatgttttatttttcttctttaattttaaatagaacactcatgcccacttttaagtctttgacaggacgctcaggcaccaaatgtaatttaaaactacgaatatcataaccaccggtctgacgtgtggttttaatggtggcaaattcgccttcggcatcaatatttttcactttaaacatcacactttgattcagtgcaggaatgaaaccttccagcgttttgtttttataaacagaagcgtattggttttcaccgacatttaaactgacccacaaatcatcatcttctaaaatgctgacaacaggtacacccatagcaacgagttcagaaggtttgccataagtttttgaaactgtacctgaaataggagcgagtaaacgagtttctgcctcaagtgcttgagcttcacttaccgcggcttttgcaatctcaacttgtgcatccgctgtagatttctgctgactggtacttccgcgctttgctcgagcatattgttgataagctgcttcacttaactcttgagcagaagtctgtgcggctaacatctcatctcgtctttgacgagaaataacaccttgtctatataaattttctccacgttgataagtggttttagcaaggtttgcctgtgctttcatactctgccaattggcataaagagtatcaatattttcctgttgagagcctcggtctaccgtagattgaaatgccaaagctgattgtagggtggctaaagcttgttgttttttagcttctatttcagggctaactaaacgaacaaggggctgacctttggaaattttctggccctcttgcacataaatttcttcaatacggctcggaaccttagtactgacatgaactgtttcagcctcaactcggccttgtaattcaataggcttaggttgatagcttttccacaaaccaaaaatgattaatcctaatagagcaataaccacgaccgcaataattagtttaattttcgaatttttaggaggttgagaatcacttttactcgtttttacttcttgagtattgtcggtttgagtattttgctgattttggtgagtttctgccgtacccgcaacaggagaattttgttctgaatgagctgagtcttgattcatgttatgcccccattagcgaatatagtcagtgtgtggttgagtcacataagctttaaactggtccatagaaccatggctttgcaacagagttgcgagcgacatgacatatttataagcatttaaagccatttctgtttttaaagcacttaatgcattttgtgcatcgatcacttgagtcgctgtacccatgccttctcggaaagaaagttcctgaatacgtaggttttcttgagctgcgctgatattcctttgtaatagcgtatgactttgctgtgctgaattgagctcgttataagacttattcaataatgcttcaatctcttgtttagttcgttcagtcatgagttctgaagcataacgttttaactcggcagcatgaatattcttatttttatctacgccagaaaaaagattgtattttgccataacacctacaatccagttttcattttcatcgagtgaatactcaccaaaagcgaaaagactgggtttttttgctgcttgttgagcctgaatatttgcatttgccaattgagtgtctaactgcattttttgcacaaggctagatttttgagagtaactgcttaaaagagattctaacgattggctacgaacagtatttacaaaaagaggagtacttaaatcagcattattttgctggtgcaaaagattgtttaaattaaattggctagcattcagatttgcctgcgcattttgtagagttcgttcggcattgttacgagcaacttcaaactgcatacgttgccctttactaataaaaccttgctgttcgagctttaacgcattgctgtaatgtttttgcattgcattaaagttaaatagactacttgcgaccagttgttgttgtaattgcacattaaaataactttgtacgacttcgaagcgctggatatcttgttgttgttggcttgaaagctcggagcgttgagcctgaatgttagctattttttttgcactagttgttaacccacctgtgtagagcggcatcaccactgaaatagatggtcggactacttggtcttctacagtcaaattagcgtagtcaggaaaacggtttataccgtcatgtatgatttggtttgagccttcctgaacttgacctaaaacatctgatggaatgacattgttccactgggataatttatcattgagtccttggcttaaatcattttcaagtttttgtttaaaagagcctaagggtacatctgtttcactatgaaaagcatatgctctcacatttaaatcaactctggggagtcctaaaccttttaccgcttcggcttctaactgagaggcttgttgtaatgcttggttggcttgagtgctgtatgagctttttaaagcctgttgttctgcttcagcataacttaaactttgcgcataaataggcgttgcaattaatactcccaataccaacgcaaggtaattgggtttaaacaaaaaaggacgtttagactgtcgatattgatgtgttggcattttatataacaatttttgatcatcccttatagtttaaatttcttgttattaaattcaattatcatattgtttattatacaattgtataaaagcacaaaatgattttgaggttatttttgcttgatggaaaatcatacagcaagtttttatatgttcaccacagtatgggaaactatattcacaagtcaagttgaactttatttaataaaacttataaaaaaataagtgaaagcaatgaaataaataaaatagttattgaaaaaataggcataaacacgccctagcattgaaatatttactagagaagctgctgcaaccttaagcaatctgtggttaaatgcctttttttattgtgtttcacttttacaagggaaaaatcatgcgcgcgtacaatttctgtgctggtcctgctgcattacctactgccgttttagaaaaagctcaacaagaattgttggattggcaaggtaagggtctatccatcatggaaatgagtcaccgtagtgctgactatgttgctgttgcggaaaaagctgaagcagatttgcgtaagctcatgaatattcctgaaaactataaagtgctatttttacaaggtggcgcgtcattacaattttcagcaattcctttaaacctgcttggaaaaaataacaaagcagattatatccatactggaatttggtctgaaaaagctttaaaagaagcaaaacgttatggcgatattaatgttgtagaagctggtattaaagtagacggtaagttcgccatttctgagcaaagcgaatggaacttgtctgacgatgcagcttatgtccattatgccgataacgaaacaattggcggtttacagtttgctggtgttcctgatgttaaagcaccactggtatgtgacttctcatcaagcattttatctgctccacttgatgtttcgaaatttggtctcatctatgcaggtgcgcaaaaaaatattggtcctgctggtttaacaattgttattatccgtgatgacttactggatcaagctaaagcagagattccaagcattttaaaatatgctgatcaagccaagaatggctctatggtaaatacaccatcgacttatgcttggtacttgtctggtttagtatttgaatggttactagagcagggtggggtagatgctatccataaagttaaccttgaaaaagctcagttactctatggttatatcgattcaagcgacttttataataacccgattgccattccaaatcgttcaattatgaatgtaccatttactttggcagatgaagcattagaaaagcaattcttgaaagaagctgaagaaaatcacttattgaacttggcaggtcaccgctcagtaggtggtatgcgtgcaagtatttataacgctgtaccattagaaggcgttcaggcgcttatccgctttatggatgattttgctaaacgtaatggttaagtcataaaatgaataaagccctcaaaaagagggctttatttttatataaatgatcaattaaaaaggcataaaaccaaattgatgtatcataattgcggctaagaacatacccaaaacgaaaaagcaaaacgcaccagtatcgacccttatacgtgggttactagtttgaatgaggctggtggtttgttcaggtataatcttcattcaatagcctaatttttaaaatattagtgaaattcaattagtttcactatttttagcataaatattcgcctgaatccagatattgccacgaatatattcgccaatattaaagtttttgtacaaatcattttttgtagcaatgcgcactaatatggcaggaaggttgtcttctaaaactaaagtgacatcataaagggtatattctgcacccataaatgacattgaagttttaccgacaatattaccttggaaccaagcttcatcttcttgaccaagattttctccatataaatatgcaaccattttagaaaaatcaaccgttacaggttcttgatcttctttagtttttggttgccattcattaatcagttcttgtaggttttcgggtgcaattccattatgttcagttaaaatcgcatttaatgcacggtgatgtttaattgacgctggatcatctacgacaattgtttctcccgcaggcactgattctaattcataggcccatgcattaaattggacttgataagtttgggttttgtcatattggcaacgattaacgctaaataaattatcaaatgcataaatcgttgtacttttatttagttttaaacttaatactgcttgagtagcagagtcacaagtaatgatgcgctcaatttgggcattatattgatagggactatcaaaactagggaaggcagtttttaaagcacgaggtttttgattttcaactgcaataatttgattaatggtgaccttctgaccttgtggaccttgaatgagccaaaaagattgatccatttcgtcttcattttggcataaacccattggcattacaggagcatcaagcgctagtccaagccattttggtacatctgtctctggatgggaagtcagtagattccaatgctctccatgactaccaaaattttggtcgtttaccgtaataacttctggactgttttgatttttcataggtacgattgatgttgggtttatctcacttgatatattaaatcgagggtaattgctatttttcaagtcaacatatgtaaattctcttgtaaaagcacgtatttagttattaaaaagttctccacctagcaaaacatgtgctgttaagagtacatataaataatcattaacgtattgttcaaattaaatttaaaaaacaagttttatatttagcgctattctctaataaaatgcatctgttagacttatatttttagtggaaatagagaataacgtgctgccattcaagttgtgggtagacgcagatgcattacctaaaattttgcgtgaagtcattttaagagcttcggatcgttatcaattagaagtgatttttgtagccaatcaaaatgtcggtattaccccttcagtgcgtattaaatctctgcaagttttaagtggagccgatcaagccgatcaggaaattgtgaatcgtatgtctgaaaatgacattgtcattacgcaagatattccactcgcagctcaagttattgagaaaggtggtattgcgattcacccacgtggtgaggtgtataccacagcgaacgtaaaagcacgtttgcacttacgtgattttatggatacgttgcgcggcgctggtgtacagacgggtggtccaccacctatttcagaacgtgataagcgcgaattttctagtgcactagaccaaacaattttaaagcaaaaacgtaaaactgcttagtgagtctcttatgccatcccaaaccaacttggcttcaacttatgtcttgcttgtatttatctgggcaacgacacctttagccattgtatggagcgtatctgacttacatgtcatgtgggctttactgttacggttttatatagctttgcctctgtcggttattgttttacttgttctaaaaacttcttttccaactcataagcaagctttacatagttattttgcagggtcttttagtttaatcggctcgcaaatttttacctatgctgcgacccaatatttaagttctggcatgattgccttgatgtttggtctagcgcccattatggctgggttgattggacgttttgcttttggtcagcatctttttaaattgcagtggctaggtatggctgttgctgtttgtggactagcgatcatttgtttaaatggttcaaatcaacatgtgcatccatttggcattgtcttaatgttggtcagcgtttttgtttattcattttctatattttgggtaaagaaagtgaatgccaaaattcagccaatggctcaggcgactggttcgatcttggtttcttcaattttggcaagctgccttattccatttatttggcaatatgcaccgactcatttaccacaagctaaatctttatttgcattaatttatacagttctgatggcttcacttgtggctatgttctgttatttcaaacttgttcagaatataaaaccgaccactttatcgttaacgacagtcattacaccaatgctagcaatgatcattggagctgttttaaatcatgaacaattgtcgattatggttttcgtgggagctttcattatcttatttggtctatttctatatttttataaagacattcaagcaaatcgtaattttgctcaacatattaagtctaagtaggagaagatgagggtaatttgttgagcttattcattaaattgttctaattcgtagctaaatgcatgatcaaattgatctcatatcttaagtagtagaaaatagcccagcaatataatattaggattgttaaggatagatcagaacttactgatttttaagccttaatacagcatctaacgatatggctaaataagaagtgtgaatgaacacttctctttttccatcaatgaccttggatttagaaggtatgtttaaaccaatctcactgtatatagggttgagatatactcgcgctcgacgcagtaatcattttatttcttttattgcattggtttcgatggtcggtttgacacttggtgtcgctgtactaattacggtactttctgtaatgaacggtttcgaccgcgaattaaaaaatcgtgttttgggaatggtaccgcaagcgacagtttcatcgacgcaaatccttacggattggcctgaactggttaaacgagttgaaaatcatccccacgtgacaggagttgcaccttttacccaattgcaaggtatgttaactgctcaagggcaagtggcaggtattatggtgacgggtattgaccctaaatatgaaaagaatgtctctatcattcaaaaccatattgttgccggtagtctagactcacttaaaaaaggtgaattcggtatcgtacttggtaaagacatggccgattcgcttggcttacgtttaaacgatagcgtgacattggttttacctgaagcgactccatctccagctggtgttgtacctcgttttaaacgctttaaagtggtgggtattttcagtgtaggtgctgaagttgactcgatggttggatacattgctttatatgatgcttcaaccttattgcgtttacctgatggcgctcaaggcgttcgtctaaaattagatgacatttttgccgctcctcaagttgccgatgacattgtgaaaaatttgccaagcaatttctacgcaaccaactggacttatacacatggcaacttatttaatgccatccaaatggaaaaaacattagttggtttattgcttgtactaattattgtagttgctgcatttaacattgtttcgtctttggttatggtcgtgactgacaaaaaatcagacattgcaattttacgtactttaggtgcatcgccatctatgattactaaaatctttatggtgcaaggtacggttattggtgtgatcggtacagttgcgggtacggttttaggggtaattctggcacttacgatcagcgatattatttcttggtttaataatgttctcgggcttaatctgttcgatgcctattttgtacattacttaccttcttacttaagatggcaagacgtgacaattattgtgattgtttctttactcttaagtttcttggcaactatttatccggcgcttcgtgcagccaaagttcaacctgccgaggcattgcgttatgagtaaagtcgttttagaagcaaaagatatttataaacattttgatgacggtaaatctaaggttgaagtcattaaaggtctctctttacaagtggaagcagggcagtttgtatctattgtcggagcaagtggttcaggtaaaagtactttgttgcatgtacttggtggcttagatcagccgactaaaggacaggtatttttgaatggtcagcactttgataatttaggtgaagcggaacgtggctttcaacgtaaccaattcttaggttttgtttaccagttccaccatttattacctgaatttactgctcttgaaaatgtagctatgcctttaatgcttcgagcagacagtcaatataagtcggtaaaggcacaggctgaatatttgctagatcgagttgggctatctcatcgtatggaccataaaccaggtgaactttcaggtggtgagcgtcaacgtgttgcacttgctcgtgcattagtgactaagcctgcggtagtactagctgatgagcctacgggtaacctagatcgtaaaaccgcagtaggtatttttgagttgctcaccgatcttaagaaagaactaaacatggcaatgttaattgtgacccatgatgagcaattagctcaggcagcagattcaatcttgcatatggaagatgggctgtgggtaaacggttcttaaaaaaattgtcattaaatcacattgttaaagcccactgagttgggctttaattttgcccctaaaatgataatgactagatttttaaatgtttaagattattctattggggtggattggcggtattgcattgatgggaatagatttccctttaatcatgcaatatgaaaaagtgggcgaggctctactgttacttgcctttattttttatctttataaacgaccaatgttcgttgatcgaccatttttaaaggcagtgttttgcttattatgtacaacaagtctttttatggttggttaccactatgctgaaaaagcactgattgaacgattagaacaaagagaaacggatacccgaaatctcgacattattgtttatataaaccgtttaagtgaagaaaaagataataaggttcaacaaactgcacaagttctaaatttttctaaagaaccggtgaattggttgctatatttaaaaagtaataatcaaaatttattaaagaataatcagaatcttgaattaggtcactattatcgaatatctggaaaaacaagacctgcgcatagttatgccaccccaggagcttttgatcaggaaaaatggtttattcagcgaaatattatgtctggttttaatgtgagatatattgagcctttaagtctcgatgaaatctatcgattgggctatcagcaacatttaaaagaacaacagtctttttccaatagttttcgtttaaatatagaaaaacttcgcttaacttttaggcaaatattaaacagctcatctctacagcaaaagggtttaattttagctttgctgacaggtgatgaaagccttttatcagatgaaactcaactacagttcaaacaattaggaattagtcatttattggcgatctcaggcccacatgtgctcatttttgccattatgttatcttgggcatgtcatcaatttatcagtcgttattatcctcaaatttacttatggaaaccgaaacaggttttgatggctgtaccatgctgccttggtgttttaatttatactgcatttgtaggtttcgaaattcctgcactacgaacattattatcagcatttatatttattggatttctattattaaaacaacctattaaaccttttacattactcgtatatagcgcaagtctactgttgctaattgacccgtttagtgtgctttctgcaggtttttggctgtcttatggggcatgctttattttattaagaatttaccaaactatagcgcagctacctgagcaacagtttttaagtctgagctcaaaaatgatttttatgggtaaggtgttaattgagtctcaaggcaaaatatttattgcattgagtcccttaaccttacttttctttcaacaaatttcttgggttgctccattaaccaatattattgccgtgcctattgttggtggtgttattgtccctttaaacatcatggctgcttgcgcatggtttatagtaaaaccgtttggaaatatgctttttcatttcaatgatatgttgctcagcatattgctgagttgtttgggcttattagaaaaactctctttaccattacaaggtataagcttgacgccactgtctttattagcgattagttttgccataattattttatttttacctaaaggaattctgcccaaaacttgggggatattatgttgtttacccttagttattatgaacaaaacgagtcaacaaattcagcttaatattttagatgttggacaggggcaagccatttttttacaacattccgaacaaaactggttaattgatacaggcggttcttacgatgaaaaaatatttagtattggacaaaatgttgtagtgccttttctacgtcagcaaggcgtaagacaattagatcatgttgtgctatcccatcttgatcaagaccatagtggcgcgtttcctcttattcaacaagagattcctgtaaagcagcttatttcgaatgaacaattaccaaatgatttaaagcaaccattccaatattgccatcaagggcaacaatggcattatcctgagttagatattcaaattttatggcctaaagaaaaagatctggcttttgttgcttctaaccagaatcaatattcttgtgttgtatatcttcaatttaaaaaagttggtggttaccaaaattttcttattatgggcgatgcaggatgggaagccgaatacgagttattaaaagattatcctaacttgaagatagatgtgttggtgctagggcatcatggaagtaagcacagttcggcttatgatttcttggcgaccttaaaacctaaactggccattgcatcggcagggtttgataaccgttatggccatcctagccaacaagttatagcacgtttaaaagctctacatattccgctaaaaagcactgtggaacaagggaccttaagttttgtgttggaaaatcacaaaatagttttacatgaccgacgtttggataggctctggttgagtagaggtttttaaagcttctgctttgagcctatctacaattttaagtgcttctgtcggatcgatattatagatattgtctaaagcagggttcgctttaaaacgtttatagctccagtgatagtgttctggatattgataaatgagttgctcaatcgcttgatggatgacatacgttccatcgtccgcagtgccttcatagattttctcatccattggctcgatatgcatggtaaagccatcgttttcattacggattgcataaagaaacagagcttttgctttagttttctggatgagttttgcacttaaattacttgaagcaagtggaacgccaaaatagttcaccatatctccacccacattaggggtatgatccggcaaaattactgtcgtttcaccttgctttaatgctttaaaaatttgtcttacaccgctttcatcggtagggacgagattcgcttgttcacggctacgggcttctcgcacaaaacggtctgcatcagcatttttaacgggtttatataaaatggtcattgatgtgaattgagcacaccatgcattcatgacttcccacgtaccaaaatgtggaacaataagaactacacctttttttgcagccaatgcttcatgaaaaaaatgttcaccttcaatacggtgaatgcgtgagatatttttactatttgatgagccccaaatacttaaaaactcaaaatatgaagttaattcgtttcttacagctttttctgtaatcgctatacgctgctgaggtgttaaatacggaagcgcaattcttaagttaagctcaatactttttgatgttctagtaatttttagagtatttacaagtcctgctaacagacgagcaagaaaacgcccaaattgaatgggttggcggctaaatgttttgagtaattgatagttcatgctttttgaatctggtctagtcatctatagcagtaagtaaggaagaaacaacaagtaaaaaaagacaaaaatattataaatgaaatcatattatttagacagtttttatcaaatcaacgtatataatgacatcatttcgattgatttggattggaattttatgtccgattggccaccaaaaccacaaaatgaacctataacccctaaacagaacggaccggaatggcaaatccttgagaaagctgtactggcttctgtagaagaacaacgccgtagtcgtcgctggggtatattctttaaaacacttacttttatttatctattgttcattatcgtcttaatgggcaaaggctgttcgaccactaaagatggctctacagcaagtagtagcagtgctcaccttgcagtagttgatattattggaactattgatgcttcaagcaatcaggctgtgaatagtgaagatacaaacaaagcgcttaaacgtgcttttgaggcatcgaatagtaaagcaattgcccttaatattaattctcctggcggttcacctgttcagtcagatgaaatctggcaggaaattcgctatttgaaaaaagagcatcctgacaagaaagtctatgcggtaattggcgatatgggtgcttcgggtgcttattatattgcttctgctgccgatgaaattattgtgaatccatcaagtttggtaggttcaattggtgtcattatgccaaactatggcattactggtttagctcaaaaactaggaattgaagatcgaactcttacagcggggacgaataaagacattttaagtatgacaaaaccgattaatcctgtacaaagacaacatatccaatctgtactcgataatgttcatactcactttattaacgcagttaaagaaggacgtgggaaacgcttaaaaactaatgatcctgctattttctctggtcttttctggactggcgagcaagcaattcagttaggcgtagctgaccgttcaggtaacattacaagcttgatgcgtgaactgaagcttgataataaagttgactacacgattgaacgtaacccattacaatccattctagggcgaatgggatcagaaatggggaaaggtttaagtgagtcggttgctgaacgcttacaaacaagtcaggacgcaaaactacaataatttaagcaggataacggtatgtcagtaaaaccggttatacactttgcgcatgccaacggcgtgccatctatggtgtatcaaaaattgtttgatcaattaaaagatgagtatgacgtaatttatgttccactcattggacctgacaaacgttatccgattaccaatcattggccttttttggttgatcaggtaattgatagtattgtacgtcaagcgaaggggcgaaaagtgattggactgggccattcactcggttcagttttaactttaatgtcttcttttagacggcctgagttgttctcacaagtgatcatgttagatccgcctcttattttaggtagatattcttttgcttttcatatggcaaaattatttaaacccaaaatagttgatgatatgacaccagcaggtttatctgcgcgtcgtcgcgagcattgggaatcacgtgagcaagcagctgcattgttacgcccaaaaggtttttataaagactttgatgaagattgctttcaagcatacattgactatgctttaaaagaagactcggtacgtggtggtgtaacgttaactatttcccgtgaagatgaagttgcgattttccgtaaaaacccttcttggtggtggttacctatgccaaaaccgaaaatgccagtacatttagttgtaggaaaagagagtgccttcttaaaaagaggttttcctcaaatggcaaaacgtaaaatggggattccatttagtgtagttgaaggagggcatatgttccctctagagcatccgattgatacagtgaattatattaaggaacttattcaccgtaattcacgctaataaagctttcgcaaaaaaaggacatgcatgcatgtccttttttaattgacgttaagcaaacttttaccaagatgcaaaacggatagggtgttcaagaatttgattgcggaaataggcttgtccatttttccatgtgagctggccattacataaccactctgcaacttgaggataaataaaatgctcaagtttatgtacacgttcggccaaggatgcaacattgtcatgttcttttacttcaatggcagattgagcaattgcttgaccagcatcaagttcagaagtcacaaagtgaacggtacagccatgtaatcgatcccccgtatttaatacacgttgatgtgtattaacgcctttataggcaggtaataatgaaggatggatattaagcattttaccttgccatttgttgacaaagtcagcagttaaaatacgcataaagccagctaaaataaccacgtcagcttgccatgcgacaagttgctgatgcatagcttcatcaaaatcttcacgactaggaaagtctttgtgagagattacggctgtcgcgatattggcattttgagcacgctctagggcataagcatcggctttattagacagtacacctacaatttgccctgatagatttgcatctatcaaggcttgtaagttgctgccgttcccagagactagaacagcaattttcatcattcaaagatcacacgaattttttcgtctgcaccttccactgattcagcattttcttggatatgtccgattttccaagctttttcaccttgagcattaagcacttcaattgctttttctgcatcatttgcatcaacagcaatgaccatacctacaccacagttaaaggtacggtacatttcaaaacgttctacattgccttcgcgttgtaaaagtttgaataattctggccattcccaagaagcttcattaattacagcttgagcaccatttggtaatacacgtggtaagttacctggtaagccgccaccagtgatgtgtgccatcgcgtgtacatcaacttgtttgcaaagctctagaactggttttacataaatacgtgttggctccattgctacatctgcaagagggcgaccatcaattacttgagttaagtctacattcttaacatctaagattttacgtagtaatgaataaccatttgagtgagcaccgcttgatgcaacaccaataagtacatcaccagattttactttagagccatcaataattttgctttgctcaactacacctacggcaaaaccagcaagatcgtaatcttcgccttcatacatgccaggcatttcagctgtttcaccacctacaagtgcgcaacctgcaagttcacaacctttaccgataccagtaactacgtttgcagctacatcgacatttaagtgaccagtcgcataatagtcgaggaagaatagtggttctgcaccacaaaccaaaagatcgtttacacacatagcgacaagatcttggccgattgtgtcatgacgattaaggttaagtgctaaacgtaatttagtacctacaccgtcagttccagaaaccaaaacaggttcttcgtaacctttaggaattttgcatagtgcaccaaagccaccaagtccgcccattacttctggacgagttgtacgtttagcgactgacttgatacgatcgaccagtgcgtcgcccgcttcaatgtcaacacccgcatctttgtagcttaaaccggtatttggggtagaagttgagttgctcataaatgaagtctccgcattggcggcagattataacctgaatatacgaaactcttatgttatttatgctcgaaaatgctatctttaataaaaatatttttccatttataacgattaaatcaaaaaaggctagattttatgcaagatcgtatactgcgccgtattttcttactcgcaggtattgtattgctggtatgggtattatacttgctcaagcctgtggtcatcccatttattggtgcttttttcctggcttatttatttagtccactagtcgaagttctagtaaaaattaagatacctcgctggttggcaattagtattgtttttattggtataggtgtaactttaaccgttgcattatggtacctggttccactgatctggaaacaacttgtttacgctcgagacagtattccagcagggattcattggattaatgcagagctattaccatggatttcttcgaccttccatgtccagcaaatggaaattgataccgatcaaatgtccaaagctgtgatggattatgttcagaccaattacagtgctgatagtattcaagcagttttattaaagcttgcacaatcaggacttaattttattcaaattggtggaacagttgttttaatcccaattattgctttttacttcttattagactgggaccgtatgttacaaaacttacgtcgtctcattccacggccatatgaggctacgaccttacaaatcgtccgtgaatgccatagcgtgttaggagcatttgttaaaggtcagttccttgttatgcttttgctcggtgtagtttatgcagtaggcttacaattaattggattagaggtaggcctaattattggtatggtggcaggtcttgccagtattattccttatctaggatttgcagtcgggattattgcagcggttattgcaagtttgttccaatttggaatggactggacacacttattacttgttggcgtagtctttatgattgggcaggcagtagagggctatattctgcagccattcctactcggtgataaaattggtctttcacctgttgcagttgtatttgctgttttagctggggctcaattggctggctttttaggaatgttaattgcattacctgtggcggctgtcattgtggtgctcttaaaacacctcagagaaaattacgaacggagttcattctatgctccatcttctacattattaatccaagagggtaatattgagcaacttcatgtagaaactgaaaatactaaacttgatcttgaagttaaaaaacagcaagatacagataccccgaatctttcagatcagaaataatttcaaggccaattcattatatgcgtcaactccaactggatatagaacctcaacttgatgcccgaatcagtgatttttcgggaccaggttgggggcatgtagtggatgcagtgcgacaactacatgcgggtctagtaaatagattttatatctatggtggcgcaggaacaggcaagagccatttgctttcagcgatttgtgattcttatttagaggtcggtaaatctgcaattaaagtttctttgcttgaacttctcgatgctccaattgaggcaattacttgcttagagcactatgatctggtggctttagatgatattgagtcaattagtggggtgcctcactggcaaaaagctgtttttcatttaatgaataaccatgaaggacaacttgttttctcttcacgtgttgcaccgattgaattaaaactagagttaccagatttacaatcgcgacttacacaagcagtgagtgtaaaagtgccgagcggaagtttatatgctgaccgctatgctttagtcacttctgtaatggctagacgtgggatccattttgatcagcagattgtagactatttacttttacatgggcctcatcaagcttctattctattgcaaaccgtagcacaattagaaaaactccttaaaggtgagaagactaaactttcaaatgcaacgttaagacaaatctatgctttaattgatgaatatcaacaataataattttctagcttctggacttttaatttattagcctaagtaaactttccttactataaaaatcatgagctatttattcttttaaccttgaaaaatacttttaaatttttataagtaaaattttcatatatcaatagatctttaattgtacaaatatttagaaagttccctatcgaaaatgacgctatagaccgatcaaaacatcttgagaaattctgattcctgtgacaaagtacgcacaaaggatgcgtttgcacaagtggaaactttgcaatattgacaaagaaaaatgaaaaaaataggtaaggagaagggtatgctcaaacggagcattgcttttgcattattggctgctgctgggcacgcttattctgctgatattgaagtcacaagtttagtggatgaagataaagatgatactgtttgtactttacgagaagcagtacagtttttgaattatcgtggttcatctaatgcagctgacgttgaaaaatatgtgaatggttatcatggctgcggaaataaggatgcttcatcaaatattattttacagcgcgataaagaatatacgttaaatagcagaataacgattacggcaccccttacaattagtacagcaaaaaacgattctactttattagatgatcaaccaggttctcataacgcgacaataaaaatggtcggtaaagatcagctatttaaaattgatgatgggaacgttgaaaaagcgtctttttcagtttctttaagcgatcttaatttacaaggagctgggtctaacaataccgtattagaaggaggattaatttataaccatgaacaattaaccattcgaaattcacgtttgataaatggttatgcaacccgaggaggtgcaatttataatgcaggtaatttatccaacacaacaaatacagcaggtacagttagtcttgtcaataatttaatccaaaataataaagcggctcaaggtggaattttatatagtgaaatgccactttattttattactcaatcagttttacgtgataatgaagtcacaacagcagataatgctttattttatacacagactaagttttccgatgaaagtactggagggtatttaacttcacgggctatcggtataagtaatagtacaatttttcataataaaggcggttttattgcaaatgttcgggatgggatgtttgttaataacattactatgattaaaaatgataaaggactatttcttgatgcgcctcaaggtaatgcttcggtttcaaatagtatattagtaggaaatactattaactgtcaggtaagtacgactgataaagcaattatacaaagtaatttggttacagcagagtgtaatcgtaatgctacatcgaagctccctaatattctttatcctgctaatgaaaaattaattgccggtgatagcgatgaaggtgcatgtgatattacctctcaaaccgggttgttgtgtccttacaatacgccaaaagatagttttctaggtttctttaggccacgcttacttgaaagttatcaatctttatctgactctttgattattaataaaggccgtctttatagtgatggttcttcaattggtttagcaagttgtgaaagatatgatcaacgcggtaaaaatcgtagtggatatgatgaactttgtgatttaggtgcgattgaatatattttggatagccaaattgctcctgttggccaagatattaaatatggtcaagttgcaaaatttagtattctgagttctctaagtgaagcagatctggtcactcctacaacctgtaagcgtttattcggtgaacgtcctgatggtaaagaatggcaacctggatgccttaaagttacacaaagtactgatacaccaacttctaaaggtgttattactttagatcagaatggaaatgtagtttatacgccaaatggaaattggcatggtgcggacatttttaggattcaagttgttacgagtgtatctcgttttaatgatggcatagagtttcaatatgtcactatccctgcaactgtagtccaagaacctgtatctggtattgaagataaatctgtgagtacgggtggaggaggaagcgtcggtagtggattaattttaggattatttggattaattgcattacgccgtttcaagtcataaacagggatgaggactatgaaaaactatcaaaaagtactaggagtacttactgttatcgcagcaatgcctttaatggctcaaactactataaaagttacaacatttaatgatgaagataatgagaacatgaatacatgttctttacgtgaagctattacagctgcagaaatgagaaaatcttatggagggtgtgaggttccagcaattgatcaaaattatacaattcaacttgatgctggtacctataccttaaataaagagttaacacctaaaattgctttaaatattattggaaaagaggcgacagattgggagcgtaaaggagttttaactaatgactatcctgctcaaaaacctcttcaaactcgtataaatgctggtggaaaatcacgaatttttaatacagctgtttaccaacaatcgttaactttaaccaatatcattttggaaaatggtaaaagtgctgagcaaggtggagcaatttacgctggtgctgatgtaactttaaaaaatagccagatcttaaactctcaagcctctaaaggcggggcaatttatcttggcggaagtactgctagtttaacaatgaatcattcattagttcaaggtaatggtaaggcttcgactgaaggtagtattttggcaatgagttgcatgtttaataattcatacagtggacgtatcttttcatttgattcaaatagttttattgataatggtggaataaactctataagtatttttgatttttgcggtagtcctacggcgaaatttactaataatacaattgctaaaaatttagcgagtcttactaatggtaatattattaaatttactggagatgctgatccattaaaaaatcaaactagtaagttaagctcatctagtagtttaacattgcaaaataatacaatcgttgagaactctgcatacaccacatttttatacgataaattaggtacaaaagaattaaattttaatatattagcgtttaatacaggttcttatgcatgtaaatatttattaggagcagcggcggctgaaaaagatactggactaaatttgaaatttaatgcattaaacttaaatggtaatactcctaaatgtgatataccgacagaagtaatttctacaggcaatacgaatattgatataaaaaatgaagtttttagtaatttattagaacctttaaaagaagctaatgaaaataatggttttttaccaatttactatcctaaaaataatttttcagcgacagatttaattgatgttgatttggaaaataagggtacatgccaaactcaggaccaacgtggattatcgagattagtaagtaatacgtactattatcaaactctagaaaagagtaaaaatagttgtgatattggttcagttgaattaatgaagcttacagcaggtgacctagaaggtttaagtaatatttcatttacaacattattagaaacctatcaaaaaagttacgacttatatgatagtttgctcaaagatccaacaactccatcaaattttattgtttattataaagtccgtttagctgaatttaaggatttacttgataaatttaagaatgacagcgcgcatataaatacaaaatatcgagctatttatattgatttaaaaaactatggttttccactaccaactgaagattcaaatcatgtattaaagttttttaatacgacggattatagtgttaaagcagagccattaggtgtggggcagaaagtagaagatttaacttcagatactgagactaagaaaaatcaaagatgcgaatggaatcctacggtacagcaaattcttttttatcgtgttgatgatgatattacttcgagtacgacatatgagttttgtaaatatacaattaccactaaaacaggtgtagagcttagtagtggcctaattaaggcgaaatttggaaatataactcctgtttcaggggatggcacgataacattcaaatatttagctaatgaaattatcccattaaatttacttaaatatgcaaatgatgatggtgatggtcctgttggtacgcttgttactaaaccgaataaacctccattttgggtaaatgacaaaggtgtagagttaccaatttatttaccaagtaaaaactcaaaagatggaatttttacagtagtaaaagcagatcgcgaaggtccatgccctggtaaagatagtaaaaatacatgttatggtggcaatatctatattcaagcgaaaaatgtatttaatacctttaatgatacactaacatattatgtatatgatgcagatggaactatctcagctaaggccggaacaattaacttagtaagtacagcaactacaactgatgattcacgtggtggtgggggtggaagtattggaattctttctatcgcatcactactaagtttaattgcttatagacgttatcgtaagtgatgataaaaataaaaagcctccactaggaggcttttttatttgttagtaactttttaatttcaaaaaaagataaatattaaatacggtttttagtgctctaaatatttatttatatattcttcacgtatagcagttctttcatcagcacttgctttgagcatccgttgacgtaaatcattgcgttcttgtgtactcattttttgccaagcttcacgcattttttgcttttctgcatctggaagctggttaaaccaatccatacgttgttgcaagttagcactttggttggatggtaattcctttaaggtttgataacgtttaattacagctcgttgctcttcttcagatagagcattccaagtatcatctacttgcgtattggcatctttcgaaaaaatccagaaacgttcgaaacctgcaaaacttgtttgcaagaaacttaatgaacaaaggataagtgctaactttttagctaccatgttgaactttatcctcacccaacaccatgagcatttctaaatcttctaccatttgtggcgataatttaggatttacaacgacttgattttgtggcttatcaagcatatctattgagtttggtaaaataacaaaaccagtaatcgctgctgcaagtgcaaaaccagtcattttccagacactataataagaggccggtttttgttggatatggtcaagcacatgattcatcaccactgttttatttttatggtgatgggccaaactatcgagtttggatgtcacctttttagtgaaatcatcatgattcattggaacctcccatgggatttaaatgcgctaaatactctctaagtccctgaattgctcgatgataatgggtttttacactaccttcggtacagttcataatttgcgctgtagtatgggtatcaaaaccttcccacgcacgtaacataaaagcttgttgttgacgaacaggtagttttgcaatcgcttcctggatctcttctatggtcactgcttgatctagaaaatctgctggattgattgctttttcatcgacaatatcaatgatttcttcatcatcattgtctagactaactttcttgaagaatgaaaatgggtttgcccgacgtgcttctttgcggcgccaatcctgaagtttattatttagaatagtataaaataggggataccattcttcagtacttcgatcggcgtaagacttgtgtaaagcaataaatgcttcttgaaccaagtccatagcaatgccttgttgtccttgggtagcactttccatcatcactaaagcacgaccagtaacatcttgcatgaaaacctttaggcgttgctcagccgtgctggcatgagcactagatgcttccgatcgagactttttcggtgctaaatccatggagatggaaaatcctgtcattggacgtacccaccttatcttcaatatatctcttatataacgttgaaaagaggtgggaggttgacaacaatcggctattttttagtagtgtaaatgatttttttcacaaatatgagcgatgtaaaataaattaacgttttattggcgttggcgaaccatttcaaaaaaacaaattgatcctgcaatggctacatttaatgactcttgaccacctggctgcggtatagtcactgattgtgcatgttctaaagcataatcacttgcaccttgtccttcattgcctaaaatccaaacacatggttttgaaaggtcttttgaataaagactagtcgagcgatgagagcttgtaacgaaaacaggaatatcgaatttaggaagaatatcggttaattgaaagttttcaaaacaagacaggctaaaatgtgcccccatacctgctcttaaaactcgtggagaccaaagtgaggcagagccttgtgtgcaaataatctgttttatatttgctgctgccgctgaacgtaacaatgtacctacgttacccggatcttgtacattttctagaattaacgtatctacgctatagtcaatggttgatgcagttttcggtaaatcgataatagccaagcaaggaagagtattacctaaagtacttaagtctttatataaaacttcgctaataataaagacatgaccttggtgaagttcaatgattttctttaaatcgggatgttctaaggcttgttcagtcgtaaacaatgaaaagagttttttctgttgttgtaaccaagctagacaaaggtgggtaccttcaagaactgtttgttgatgcttttttcgggcgctattgagttcaattaaaccacgcaaatgtttaatttttgcattgtcttttgattctaaaaaaataaccgccataagggaatatccaaaagggcgtcatcatactatgacgccctgtgtaatttaaattattaatgatagcttgttacacgttcaacttcattcttagaaccgataatcacaggaacacgttgatgaagttctgtaggttcaatctctagaatgcgtacacggccagtagttgatgcgccgcctgcttgttcaatgagcatactcattgggttagcttcatacattaaacgtaaacgaccagcttttttcgggtctttcaagtcatatggataaaggaaaataccgccacgacataaaatacggtgaacatcacccaccatacatgcgacccaacgcatattgaagtctttttcacgtacagatgttttacctgcaagtaactcttcaatatattgttttactggttgttcccaatggcgttggttagatgcattaatagcaaattcttgagtatctgctgatacttgaacattctctgtagtaagtaagaatgtttgagtttctggatctaacgtaaagaaagctacaccgtttccgactgttaaagccatcatagttgatgggccatataacacatagccagcagcaacttgttgagtacctgcctgcatgaaatcttgtgcttgtgtaaccgcatttttggcaggaagaatcgagaagattgttccgacacacatgttgatatcaatgttgcttgaaccatctaatggatcaaatagaaccaagtattcgccgttttcttgtgctggtgtaaaatcatcaagttcttcagatgcaagaccaccgacgtgaggatggacttttaaagcatcgattaaatagtcattagaaatcacatcaagttttttctgtgtttcaccttgaacattttcgttacctgcgctacccaaaattccagccaaggcacctttttgtaaggcttgatcaatggttttacaagtcgcagcaattgtgtcgatgacttgagccaactcaggtgtaagattccctttttcttgttgtaaaaattgggacaatgtgaggttggacataaaaaaacgctcctgtgcgcaagcatcaaaatgagtcagataaatacgtggcatattctagatgagaatgccgaaaaataaaaattatcttactttatttgtgttgcatttatgcttacaagccccattttacgtggtatgttgtttgcataacaaaggaatgtagatttaggagaatcgaaatgacaactaagaagtttgatgcgaccccaacagcaggtgaaccaatcaatttagaagaaatttcgaaagaaagtgttcaggaagcttggaaagattatgaggcaaaacctgaatataaagcttttaataagcatgatttgattgagtcaatgcaacattcagaagaagagcaaaacaaatcttcttaaagtaagaatgtaaaaataaacgcccatatgtgggcgtttattttttgggatgttttattttaatagaggaggaaccgcttcatagttaatttcaacgcggcggttttctttccaagctgattcatcatggccaggattaacaggcgcttctttaccataacttacagcttcaagttgctgaggatttacaccactggtaataagataattctgaactgcttttgcacgacgctcacccaaggccatgttgtattcgcgtgtaccgcgctcgtctgtatgaccagttaatgcaacttttgagtttgcatttgccatgaggaactgagcatgagcctgaagtgtttggtaatcttcagtagataaatcactactgtcataatcgaagtgaacgacgcgtttcgctagggcagccttgtttgcctcagttacaccttttgaagaagcacctgctagattttgagcatttaatgcagcatcttcacttaagccggtcgtatttactgtgcttgggttagttgtacctgtagttgccgttgttgctggcttacgacttgcacaacctgtcatgacaagtgccgcactaagtagaggaaaggccaaatatttaattgatttcatcatcatctccatcaatggaataaaaagttatttaggtgcccaggctggttcacgtacttcaccttgttcactcggtaaattcatacggaaacgaccatcagtggacatgatagacagtaaaccacggttcccttcacgagttgcataaaccaccatttgcccatttggtgagaaacttggtgattcatctaaactggttggggtaagaatattgacaatgcctgtattaatatcttggatcgcaactttatagttactaccacttggtcgatgcacgagtgcaatttttttaccatctgcacttaaagtgccacgagcattaaatgaccctttaaatgttaagcgttttactgagccattcccaaaatcatagcgataaatttgaggagagccaccacggtcagatgtaaaaataaaagcttttccatctggtgtgtaacgcgcttcagtatcaattcccgagtcatttgtcatgcgtttgacttggcgagttgataaatccatttgataaatttcagggttaccattcatcgatgctgtaaatagcattgatttgccatctggtgaaaagcttggtgcaccatttaagcctttaaaactcgtaagtacttcacgtgttccagtagagagatcttgtaaataaatggctggacgtttagtttcaaaagaaacataagcaatttttttagcgtcaggagtccatgccggagacaaaatcgggtcacgtgaagagagaacagttttcggttgttcaccatctgtatcggcgatttgtaaggtataacgttcagcaggagtggcaggattacgtaatacataagcgatacgaccactaaaatcgcctggaattccggttaaggcctgataaatagcgtcacttaccatatgtcctgcttgacgtatgcgtgaagcaggaacatttaacaactcattcagaagatattgctgtttttgtacatcataaagttggtaatggacttcaaacccgtcagctgtttgcttaatttgtccagtaacaacataaggaatacccgcagcttgccaatcagatgcttgaatctggttaatagcggcattcgcaggtaaattttttgatgaacttgtaaaacgtcctgagcggttcaagtcagtttcaacaataggataaagtccattgtcgttattaaaaggcacaatagcgattttaggcgcctgatcaggtgcttttgcaatctctaaatgtaattgagcaaaggcagctgttggtgcaagaggacttaatgctgtaagtagcgttaaggcgagaaggtgtttgcggctcgttttcataggtttaaagtcattgaaggtatttttgtgactggtgattttgtagcatagttacatgcttcaaactatttaaagcatgtaactcttacaaaattattgtgctctgaaagtagaggtaacgcttcgcgcttctcgtcttgcatcaggatccgatggcattgggtagggagcagacgcctgaattgcagctttgatacttgcatccaatgcatcatctccacttgaccgtgtaataacaatcgagctaacactacctgagtcagacagggtaaatctaacgctaacagttttaccactgcttcctgtaggaacatcccaagcacgacgaattttctgctcaaaatcacgtttagccgaagatgcaatttttttagcttcaccttttttctgggcagcttcttcttgagcttttttagcagatgcagctttttcttcggcctcaatttcggctttacgtctagcatcttctgctgctttttgttgtttggcttttgcatcagcctcagctttgcgtttagcgtcttcagccgctttttgctgtttagctttcgcatcagcctcagctttgcgcttagcatcttcagctgctttttgctgcttggcttttgcatcagcctcagctttacgtttagcatcttcagctgctttttgctgtttagctttcgcatcggcctcggctttacgtttagcgttatcagctgcttgttgcttagccttagcatctgcttcagccttacgtttggcgtcttcggcagctttttgttgtttggctttagcatctgcttcggcttttcgtttagcttcttgttgtgcttgaagtttagcgttttcagccttttgagcttcacgttttagtcttgcttcagtctccgctttacgtttagcttcctcagttgctttttgtctagctttcgcatccgcctcagcttttgcattttgttcggcttttcgtttttgttcagcttcagctctcgctttagcctccgcttgacgcttagcttcggcctgttgcttctgtgcttcctctaaacgttgttgctctgcagcttgctttgctttagcagcttcttcagctttacgcttttcctcagctaattttgcttgttgtgcctgctcagctttttgcttttgagcagcaagttgttgtgctgttggaggaggaggggcagctggaagattttgaggaagagtttcatccacaatcgggcttagaacttcttcagcctgattttctgctacggttggttgctcaacttcttttgccaaagggggtggtaaatcttctggtttaactaaaacagtggtcagcttttttggttgttcaggtggtttactcaagcctaaaaaaagcaagccaacaatggcaattgcatgaactccaagggtgaagctcaatgctattgcattttgtttaaaaggaggcttttgatttttattcatagcttattttaaaggctctgtcagaaggccaacttgagttaaacctgcttcttgtaaacttgccatcaatgatacgacttctccataagggcgggtcttatcaccattcactaaaactgtaagttgtttattttcctgctcagcttgtttttgtgcttcacttaaaacagactcaagtttttcaagagaaagtggctcattatctttgtaatcttcatattgaagataaatattgccatctttaccaatcgtgaccatggctggcatatcttttgattcaattggatgattatttgcctgaggtaaatcgactttaataccactggtaatcatgggagcagtcaccatgaaaatcactaaaagtaccagcattacatcgatataaggcacgacgttcatgtcactttttaatggtttttttatgcgctcaaagcgccctgaacgttgaatggccattatgcatcttcctgtgacgaacccacagattgacgttgcaataaagcaatcatctcttcggcaaataatgcacgatcagagtagacactttcgcttttagccgtaaagtggttaaaagccaataccgcaggaattgcagcaaatagaccaattgcagttgcaataagggcctcggcaatacctggcgcaactgtcgctaacgtcacttggtcaacagcagccaaaccaataaaagcattcatgattccccaaacagtaccgaataaaccgatatatggggcaaccgaaccgatacttgctaaagtacctaaaccatattccagactaccctgatcacgacttaaacctacacgtaaaatacgttctgttccttcgatcatttgtgaggtaggagcttggcgttttttgagtttaaaaaactcacttaatccttgataaaagatatcttcaaggcctgagcgttttgaattgagttgtgcgttgttgtaaagcgtattgagttcagcaccagaccagaacattttttggaaatgttcatcatcttggcgtgcttttttataactcatatgtaacttggcaatcaggtaccaactaaaaattgatgctaacaataaaatcagcatgaccaactggacgactggacttgcttgtaaaataaggtcagaaatatgcagggttgattcaatgtttgttgccatagttacatatgccggttgtttttttagtcttgttccaattctttacgaataagatcacgtatttcttccggaagacgacgtggcattagatctttacttaaacatgccaactcaacctcaccagaagcaagcaagatttcaccacgataaatattttgttgcaacacaaatgacgcagctttacatgaaactacacgtgctgtaacagtaattaagtcatccattaaaataggacgcatatattttacgtcaattttatatactacaaagttgtagtctttttgatgccagtaatggtcaacgccagcagcgcggagccattctgtacgggtacgttccatatagcgaatgtggttggcatggtaaacaataccacctgcgtccgtatcttcaatataaacacgaatgttgaattcaaaatgattcgccatgagagtattccgttttagttcactatagagctttatatttaaaatatgactgttgaataaaatatcagttctatccaaagccatacatctgcttttaaatacggggcagtttagcagattgcatactaagtcctatggcacaacctttcaatcgcgactgctgtctttcttctttaaaatggaacactctatggtgaacatattgttaagttacgactgtttccatgcagcctgaacttgtttagcaatatttggatagtctaaaacgaatcttatatgcagctcggttcctgtctttaaggccttatcatctactataaaagaagggttatgattcggtgcagcttggcttaagtcctgattttcaggtgttgctcctaagaaaacgaagaaagagggcattaatttcccataataggcaaaatcttcacttgcacttgcattatggtccaaaacatgaagattcgaatctccaacagttttggctaatgttggctggataagttgagtaagagctttattattcatggttactggagcataaggcgcaatttcaacttttgctgttacatcattggcttgagcgttattttccaccagagttggtaagctctttaggatattttctcggatctgttcgttattggatcgaatagtaccgatcatattgacctgttcaggaatcacatttccagctgtaccgccttgaatattgccaatactaataacgcccataccttgggttaggtcggttcttcggctaataagactttgtaaattattaatcatttgagctgatgcataaattggatctctgcctaaccaaggggtagagccatgaacctgtttgccgttaacttgaatacgtaagtgatcggcactgtttaaaatagcaccatctttataatatagatgtccgcttttcatgccggacatgacatgcatgccaaaaatagcttctggtttgtagtctttaaatgcaccatccgcaatcatttttcttgagccgatttgatcaccatgcgtgaagttatctatatctgctccaccttcttcagctggctgaaatacaaaaactacagtgcctgatattttatctttattggccgccaatatctttgctgcacctaataacattgcagtgtgcgcatcgtgtccacaagcatgcatcacataagtttctttaccttgataaattgccttttgtttactagcaaatggcacaccacttttttcttccataggtagcgcatccatatctgctctaagcgcaataatagggccggggttattcccttttaaaatgccgattacccctgtttttgcataacctgttttgacttgaatgccataagactttaattctttttgaaccaatgcagatgttttaaattccatattgcctagttcagggtactcatggatgtgttgtcttaattgaatgacctgattttcattttgttgtgtagcatcttttacccaatccgctaggctcaattgacttattagggcaagtggaaaaattaaagcggcttttttgtacatatccttatcctaaaaatattattgttcagaagatttaatatctagatttcttataattcagtttttaaaaatattaaaaaatcaataaggtataacgaaagacttaaaaggtatagagtggctaatttattgataagacaatttttatttgagttaaaaagaatagttaaataaaaaaaggaagagaaaattctcttcctttgattagtttttaggctcaggtggcgtcatgccaaactgcaaataagattggttggttgcaatgcgacctcgtgcagtacgcataacataaccttgctgaattaaataaggttcaataacatcttcaagtgttccgctatcttcagccatagcagctgcaagggcttcaacaccagcaggtccaccatcaaaacgttctaacaacatacttaaataacgtcggtctaaggtatctaaaccagctttatcgacattaagcatatcaagcgcacgttgtgccatttcatggttaacttcgcctgtaccttttacttgtgcatagtcacgtacacggcgtaataaacgattggcaatacgcggtgttccgcgtgaacggcgtgcaacttcttctgcaccctcaactgtaatgggtacatccatgaggtttgcagatcgtgacacgatgtgagttaagtcttctacagaatagaattcaagacgttgcacaataccgaaacggtcacgtagaggcgaggtgagtaagccggcacgtgtggtcgcagcaacaagtgtaaaagggggtaaatctagtttaattgaacgggcagcagggccttcaccaatcatgatatcgagttggtaatcttccattgctggatagaggatttcttcaatcactggtgaaagacgatgaatctcatcaataaataaaacatcgccttcttcaaggttagtcagcattgcagccaaatcacccgcacgctctaaaacaggccctgaagtggatttgagattgccacccatttcacgcgcaataatattggcaagcgtagtttttcctaagcccggtggaccgaaaatcagtgtgtgatcgagtgcctcaccacgaccacgagccgcaccgatgaaaatttccatttgctcgcgtacgactggttgcccgatataatcggcaagtgacgtcggtcgaatagcccgatcaaaatgatcttcaggtttttctgttccactgattagacggtcttgcataggtgtgtttacttcatcattgatttaagtgcagcacgaataatatcggctgattcagtgtaatcggctttaaccgccgcaacagctttttgtgcctcaagaggtttataacctagtgactgtaaggctgcttctgcttctgcaacaggtgagttcgaaacaaattgaatctgaggcagggccgcagcgctagaagttccttgtgccaaagttttaaaacggtcacgaagttcaatcattaaacgttcagctgtttttttgcctacacctggaactttaaccaaagtattcacatcgtcatgttcaattgtgtgtaccagcaattcaacatttaacgtagaaagaatacctagtgccattttcgggcccacaccatttacttttagtaaggtgcggaaaatagttttctcttgagcatcactaaaaccataaagctgctgagcatcttcacgaacgaccaaatgcgtccatagcgtaactttctggcctttttgtaattggcaaaatgttgaaagcggtgtatcaatttcatagcccacaccatttacattcagtaagacagttggggcttctagggcaaacacttcgccaattaaacatccgatcatagcgtaatttcacttattcataactgtaaatctggtcgttttaaatgtattaaaacgacactagctgtatttctttctatattaaggcagcttaaaacaagccgattttattaccttgtagctcttgagccaagctataagcctgatgatctgaaaacttactgataatatcgagtacctgcatgatattgctgtagtggttattactaaagcgagcaccgtacaaattaagaatagacatcaagcgctgttctttaaagcttaaagatttatgcggcatcgttaaggggacaaatgcatcaagaatagtttgcaaactttggtgagcaataatttctaaaccagacttttgtgggtgttcgaagattttttcacgtgccagatttttggctgtttcaatacctgccgcgatatcaggcgaacagtactgtaaaagactacctttgagctgaccagtaataatttcataatgatgtttggcaaaagctgtagtgacttcatcaaccagacgcttcataacacggccacgcaatgccgaaattttttgttgccatgtgctacttgggagtgatagctcttcaggttgaccataatctgcaatcaagttgagaaaaattggttcaacctcttggtaattcagcatatttagaataatgccatcttctaaatcgatgagggcatagcaaatatcatcggcagcttctaacaaataggtaagtggatgacggcagtagtgatattcacctaattgaataagtccgagctgctcagcaatttgttttaaaatttctttttcagactgataacaaccaaatttcgctcgttggtgtgatggacgatcaccttgagaagctattgtttttgaaagccaaggatattttaaataagcgcctaaggttgcgtaagttaaacgcatgcctccatcatcaggatgatagtcaatacgggttaataggcgtaatccttgggcgttgccttcaaactgacggacatcggcttcttcttcgggagttaacttttttaaaaaatcattatgtgaggcatcgtcaaaccattcacgaattgcatattcacctgcatgaccgaagggtgggttaccaatgtcatgagcaaggcaggccgcttgaataattgcaccgacatcggcaggagaaatccagacaggcaattcatctttaattttttcggctgccagcatgcccatagaacggccaatacaggaaacttcaagcgagtgagttaaacgggtatgaatgccatcatgctgtgccaaagggtgaacttgagtcttgcggtttaactgacgaaaactttgtgaaaatataatacggtcataatctttatgaaatgggcttcgagccagctctgtactgctttttttactacctaaacgaactgcagatagcagttctaaccaacgcatttgttccatttatcattattcaaaactataaagtctgatcatgccaaaaaaatgctaaaagcactagcttggtgcgacatagtttgtcttagttcaggttttattatgttattgaataaacatgaaacaatttattttgagcgagaatgattaaaaaaatgattttgaacaaaaaacacatcacttcttgcagaattaggttacagaatactgattctacatctagctgattttagcaagacacagtagaatatgcgctctctctaaagtcacattgcggtaaggttcacaagacctgcccgtggagccaaaatcaacatgtttatcgtggccggtgcagcagcacattcttcttttaagaaagctcaactattaacacgtttatcgtcaattagttctgttcaatcttttgacagccaatgggtctatttgtttgatcaagcgctcaacgagcagcaacatcaatctgctttgcaattattaaatgacggtgagtcttttgaacttcgtcaacctgcaagtgatgagattcagattttagtaacaccacgcgtgggtacgatttcaccttggtcatctaaagcgactgacattttcaaaaactgtaatactccagttcaccgtttagaacgtggtcttttattcactttaaaaggtgtttctgaaatttctaatgaagtaaaacaagtacttcatgaccgtatgactgaaactgtttttgcacaaattgaagatgcaaaagcactattttcagaaacagcaccaaaacctttaaattcaattgatattttaggtcaaggtaaagaagcattagtaaaagccaacaacgaatttggttttgcgttatctgaacaagaaattgattatttaactgaagcatttactcgacttggtcgtaacccaaatgacatcgagttgatgatgtttgcacaagcaaactctgaacactgtcgtcataaaatcttcggttctgaatggacaattgatggtgaaaaacaaccattatcattgttccaaatgattaaaaacacttataaagaatctccaactgacgtgttatcggcatataaagataacgcatctgtaattgttggttatgacacgatgcgtttttatccgaaagcagatgaaaacggtcattttgtttacaaatataagagccaagctgctcacattttaatgaaggttgaaactcacaaccacccaacagcaatttctccatttgctggcgcagcaacaggttcaggcggtgaaatccgtgatgaaggtgcaactggtcgtggtggtaaaccgaaagcaggtttaacaggctttacagtttctaacttaaatattcctggttttgaacaaccttgggaagaaaactacggtaaaccttcacgtatggcatcgccattacaaattatgattgaaggtccattaggtggcgcggcatttaacaatgaattcggccgtcctgcattaaatggctatttccgtactttcgaacaaaacgtaaatggtgaagtgaagggcttccataagccaatcatgatcgcgggtggttacggtaacattcgtcctgaccatgtagaaaaagatgcgattcaaccgggtgacttgctcattgtattgggtggccctgcgatgttaatcggtcttggtggtggcgcagcctcttctgtagacagcggtacaatgggtgaaagccttgatttcgcatctgtacaacgtgaaaacccagaaatggaacgccgttgtcaggaagtgattgatacttgctggcgtttagaagactttaacccaatcgtgtctattcatgacgtaggtgctggtggtttatcaaatgcaatgcctgagcttgtaaacgatcatgagttaggtgcagttcttaaccttcgtaagattccttcattagagccgggcatgagcccaatggaaatctggtcaaatgaagcacaagagcgttatgttcttgcaattcgtccagagtctttagaacagttcgaatcaatctgtgctcgtgaacgttgtccatttgccgtgttaggtgaagcaactgaagctcgtcacttaactgttgaagatccattgttccaaaacaacgcagttgatatcccaatgcaagtgatgcttggtggtacaccgcgtatgcaacgttcttatgaaacaattgaacgtaaaggcaacgaatttgacgcttcaaaagttgatttgaaagatgcgattttccgtgtattgaaaaatcctacagttgcgtctaaatcattcttgatcaccattggtgaccgttcaattacaggtatggttgcacgtgaccaaatggttggtcgttggcagattcctgttgcagatgcagcagtaacgactaccagcctacaaggcttcactggtgaagcaatggcaatgggtgaacgtccaccagttgcattgttaaatccagcagcgtctgctcgcttggcagttgctgaagcaattaccaatattgcatgtgcaaacattgaacaaattagcgatatcaaactttctgcaaactggatggctgctgctggtcaaaaaggtgaagaccaagcattgtttgaaggtgtaaaagcaattggtatggaaatgtgtcctgctttaggaattgcgattcctgtaggtaaagactcactttcaatgcgtaccacttggaacgataacggtgaagataaagctgtaacatctccaatgactggtgtaattactgcatttgctccagtagctgatgttcgtaagactttaacacctgaacttaagaatttagaagactcagtacttgtccgtattgatttatctaaaggacaattccgtttaggtggttcgattcttgcgcaagtatataaagcaattggttcagtcactccagatgttgatagttttgatgatttcaaagcgttctttgctttaattcaagactggaataaccgtggcgtgattcaggcttaccatgacatcggtgatggtggtttactcgcaactgtagctgaaatgatgttcgcttcgcgtttaggtgtagcattagaagatcagactactgctggtttatttgcagaagaaattggtgcagtagttcaaatcaaagcagctgattgggaagctttacaagcagaagtagctgcttctagcttaaaagatgcaattgctgtagttggtcgcgtaaataatactgatcaattatctgtaaatggcttaactttagagcgtgctgagttacaacaggcttggtctgaagtatctcatcagatccaacgtttacgtgataacgttgaaactgctgaccaagaatttgctttaattactgataaatcacatcagggtttaattgcaaaacctacatttgatttaaatgaacctatcgaagcaccgtttattaatagccgtcgtccgaatatggcaatcttgcgtgagcagggtgtaaatggtcatattgaaatggctgcagctttcgataaagttggctttaacacaattgacgtacatatgagcgacttacttgctggtcgtgtgagcctaagtgatttcgaaggtttagtgacttgtggcggtttctcttacggtgacgtaatgggtgcaggcggtggctgggcaaaatcagttctgttcaatgcaaaactacgtgatcagtttgagcaattcttccaccgtgaaggtacatttagcttaggtatctgtaatggttgccaaatgttgtcacaattagcgccacttattccgggtgctgaacactggccacgtttccaccgcaatatgtcagaagtttttgaagcacgtagcgtaaacgttcgtgttgaaaaatcagtttctgtattacttgatggtatggaaggttcaattttaccgattgctgtagcacatggtgaaggccgtgcggttgctagcgaagctgatattgcaagcttaaatgcagcgaatcaggttgcattgcgttatgttgacagccatggtaacccgactcaacattatccattgaacccaaatggttcaccggaagcgattacgggcgtaacgtctaaagatggtcgtgcaacgattatgatgccgcaccctgagcgtactttccgtgctatccagcattcttggaaaccagaagagtggactgaagacggtgcttggttacgtatgttccgtaacgcacgtaagtttattggttaatataaaaattgaaataagccaccgtaaggtggcttatttgtatgtagtacaatgtgaatagaataaatagtagagaagaaaaatgaagtcaaaaatccatttccgtgagtttgcactgttgatggcattactcatgtctatcgtgtctttttcgatagatgcggtgttgcctgctttaggtgaggttggacgagtttttgaattaaagaataataatcagacccagtgggtcattattggtattttctccggcatgacaatagggcagttgattgcaggaccactttccgatgcgattggacgaaaacgtattttatttaccggtattatcatctactttttgggaagtttattgtgctttaccacacaaagttttgaatggtttttagtaggtcgctttattcagggtattggggtttcaggtccttatgtcgcctcaatttccattgtgcgagataaatacagcggtgctcaaatggcccgtattatgtccttaatcatgatggtatttatggtcgctccagcgattgcaccaagtctgggacaactcattattcacttctttggttggcgtgatatttttgttttatatatgatctatgccacagttgttggagcgtgggtcgctttacgattagaagagacgttacttcctgaaaatcgtttacctatgcgtttacaagcatttcaagatgggttcaaagaagttgtaagtaataaaaccaccatgagctatttattatgtgcaggcttttgctttggtggatttattggttacttaggtacttctcagcaaatttttatgcagcagtttggtaaaacagggcaagagtttagtgcttattttgctgtgcttgctggtgtaatgggcattgcttcatttaccaattctaaaattgtcatgaagtttggtatgcgtccaatctgtatttatggctttctcggtctgtgcttaatttcattaattttcttagggattcaacttataggtgtgactgtagcattttggatgtttatgctttatgcctgtattttatttttattatttggaactttatttggtaatttaaacgcgattgcaatggaacctatgggacatgtagctggtatggcatcagctattattggtgcagcttcgtccgtattgtcgcttattcttgcctctattattgggcaattatataacggcacactaattccaatgacttgcggttttgtcattttatgtggtttagcatttatgatgacagtatatgagaacagatatttaaagaaatcgaatgtttaaaatgatccagaataatgatagctcactgaattagaaaaattttctttaaacttaaagtaacggtaagaaaatacgttttttaaggactttaagaaaatctataagagtatagacataagtgtatttaaccccttatgcttggattgctgttggttcaatttttgctttctctgtaacaacgataaaaatcggagatcaaaatgatgaaaaacaaaaatcacataagaacgatgtacacaagagataaaggctggcgtttatttggcttggcgcttgccatacaaatactttttattggagcaaattatttagcaatgatgagctgactttgattcggagtcttcttaaagggtatgatttaaagcaaatttactagttttgagtcattctattcatgttaaagctgatttattacgtaccagagtcacatcttgagtcgactaaacagtctatatttgcggccggagcaggtgggatagggaactatgaacaatgtgcttggcaagttaaaggaatagggcaattcaagccagttaaaggagctgacccttatattggagagctaggtgaacttgagcaagttgacgaatggcgtgttgaaacgattgtgcttgaagaaaaggcaagtgcagtggcaaaagcattaaaggcaagccatccttacgaagagcctgcctttgagtttattcaaatcatagaagttgatttttaattaaactgtgaaaagtccggtttacgtttttgcataaatgcctgcacagcttctagcatttctggtgattgaacgcgttgcataaagatttctgcttcatggtcaatacattcaataatctgatctaaatcatgtttcattaatgctttggtttgttttaatgaagcaagcggtaaagctgttaagtgttgggcagttgcctgagcagtggcataagcatcttcaacgatttcattaactaaaccagcttgtacagcagtttctgcattgaactttttggcagtaaacagtagttcagctgctttgtgataaccagcttgtttaaccaataattgacttgcaccaccttcaggagaaagcccaaggctaacaaaaggaatttgaaagagggccgtattgtcggcaaaaacgaggtctgcctgtaataaaatcgtaacaccaataccaattgccacgccttttactgcaataataagcggcttcgataatctggcagcagatttaaggagtacaaatggaggaacttgacctgctggaccagcattcggattttgtacaaaacccataaaatctttcatgtcattaccagcggtaaagtcatgttcggcaccacgtagaacgattactcgtacatctttattttggtcggcttcatcaagtgctttggcaatccataagtaaagttcgccatataatgcattttttgcttctgggcgatttatggctaaggtgagtacgccaccttctaaatttgcttgtaaatgttgatgaggttgttgaatacagctaagtgtcatcgtactatccttgctttaaaccacgttgttgatttttaggttctcattatggcgcatattttttgtaatgagcgtaactggtgagttcataaaaagtgaaaaactaattatgtatacatttgactatctcgtttttataggtcgttttcagccatttcatttggcacatatgcaaacgattgaaattgcactgcaacaaagtcgctatgtgattttggctttaggttctgcccaaatggaacgtaatataaaaaatccgtttcttgcaattgaacgagaacaaatgattttatctaatttttcattagatgagcaaaagcgcattcgttttgtacatgtggttgatgtttataatgatgagaagtgggtaaaacaggttaaatcattagtaaatggtgtaatagaaccgaactcaaaagttggtttgattggccacttcaaagatgagtcatcttattatttacgactatttcctgaatgggtgatggtcgaacttgatagcttgaaagattcgatttctgccactccaatgcgtgaagcctactatctgggcaaaattaaaacggatgcatttcccaaaggcaccattcaatttttggaagaattccaaaatacaccgttatatttacagctacagcaaaagtttttacaggcagaccattcaaatattgaggaaaccgtgtcgtctcataaagaatgattcgatctaactaaagaatctctggtttttaaaagtagattgaattttttgatgcttttttgagtctactttaaaaacctgcaaattgttgtgtccaatagcttctttgtttagcagactggtcagaagcacatgcaatggcatattcggtatatctagggttcatgatattactgcaatgcagaggactggcgatccatttagccatgacctcatttaaagttttttgtccactcgcgacattctcaccattggctttactcagcatatgatatttttttaatctcgctcttaaatctaaacctgttgagccaacatgcccgagaaagttgttatttgccatatctttagagtgagcatttgcaccttgatataaattattattccagcttaaaggtttagctgcagaaaaatactgctgaccacattgacgagaatcttgtcgaatttgattaattgcattaagcacagcttgtcggtaagcagaattttgtaaatcttggcagcttatttctatcgatgatttttgaacttgtggtgtagaagagctcagtgtaggaggagtacttgatgaattaacggagcaggcagcaataacaaggctacaaggcaataaagtacaaacttttagtagattcatagcaatgcctgagttcgggttattttaatatttttatcatacgccaaattaaaatggctgagcaatttatgtgcgtgtaaaaaagcgagtattcaactcgcttttttgttactcaagcttattaagctgtttgtaatgcttttaaatcttctaaaacctgttcagcatggccggctgctttcaccttacggtaacttttaactaaggttttattatggaaaataaaagtagagcgttcgatccccattacttttttcccatacatattcttttctttaatcacatcaaagtgtttgcaaagtacttcttctttgtcactaattaaatcgattgtcagtgcctgcttttctgtaaagttttggtgggcttttaccgagtcgcgtgatactccaaaaatacgagcacctaaaacatcaaattgatcttttaaacaagaaaagccgacagcttgtgttgtacagcctggcgttgagtctttagggtagaagtaaataatcagccattcattatcgacttcagccaaattaacttcgccgtgtgtggttgggaaaacctgatttggcagttgaatattctcagacatttcttatcctttaaaagttaaatttgatctaattcaagtggtaaaaaagcatattcttcatgataaacaatatcgagctttcttacaggaatagctttgttaaaaattggaccatcaatcacagtggtatgaaattcaccgccttctccacatggatcaattccacggttttcaagttcctgtatatattctaacgataacacttgacctaaatcttccaccttcatcccgagtttaaggtttacagtcacaactacactctgaaatccaagttgaataaattcttcaacaacttcacgatggggccttagccagagcggcattcctaatttaaggcccactgtttgagtaacacgatcatgccaacaaccatgttccggcatatctaaatcacctgtaaccagtacctcagcacctttttgtttggcttcatttaataagttgatgaatttattttcatagtcattccagctagaagatgccataaatacaggtaagccaattgcttgtgcttgcgcccgaataatatcaagtggcattgcatgtgaacgggagcgttgtccttgctcttccagcataacgattaaaccaattacgttaccggtttgcatggcatgataaagtgcaagagagctgtctttacctccactaaaggagacaattgactgtctgttatgtgcgttagttttccattggtcttgcatggcttatttcgaatggcgagatcggtgtcattttaacagagctataaaaaaagcctgcataaatgcaggcttaatttggagcaacaaaagcttattttttaggagcttgttgttgagctgctttcattgcttcttcagttaatttctcaagcttagttgttaactgaggaccgaaacatgctttaagatcacggttttgttgttgtacaaaagctaaagagcttgggcttttcttcgcattgattgcgctttgaatttcccatttttgtgcttcagtcactttaccttgcgcttcaacttggcagctacagaatttgcttacttcagctgaacttaatttaccgccttttgcagtttgatctttacaaacgttgattaatgcacctttaacgttagtgcttttatatgctgcttgaactgggttttcagctgcttgagctgaaccagccataagtgcagctgctgagaataaagatgaaagaataagatttgattttaacaacttcataaattttacctacttattgcggtatatagcgtgttggatcggtaacaccagcatcgataaagccttctttacgcaaacggcaactgtcacatttaccacacgcacgtccttgagcatctgcttggtagcaagataccgtttgactatagtctacgccatgttcaatccctaaacgtataatattcgctttggataaatgtaacaggggtgtttcaaatttaagaggttttccttctacgccagctttagttgctaaacgagccatattggcaaaagcatcaataaattctgggcgacagtcaggatatcctgaataatcaacagcattgatgccaataacaattgcttcagcattgaaaacttctgctgctgctaaggcataagagaggaaaattgtgttacgtgctggtacataagttacaggaataccttcttgtaattgttctggtacagcaatgttatgatctgtaagtgcagacccgcctaaattggctaaatcgatattaattacacgatgttcaacacctgcacgctgagctaatgcttttgcagcatcaagttcagtggttgagcgttgaccatacataaaactaatagcaatacattcatagcgcgcttgtgcccaagctaggcaagtggttgagtctaagccgcctgaaagtaaaacaatggcacgagggcgcatatttttctccatattcggaatgatttattttattgaacgattagcgacctgattcatcgttccagagcagtttatgtaactgaagctggaaacgtacaggcagtttgtcgtccagtatccactgtgccagatcacgtgctaaacgtggcaggccaacagcacctttttcaactgcaaaagcaggggagaaccagacagtactgactttggtttgcagttgatattgttcaacttgttgttttgaccattcatagtcttcacgattacaaatcacaaatttgatttggtcacgcggtgttaaatggtcaagattactgatgagattacggtgttcttcaccagaagttggggtctttaagtcgaggacttttgaaacacgcggatctactcttgatacatcaagagcgccactggtttctagggaaacgtcaaaaccggcgtcacacaaacgttgtaataaaattaagcaattgggttgtgcaagtggttcaccgcctgttacacaaatataaggcgtttgatatttttcagccgtttcaataatgtgctcaagtgataagcgttcgccaccttcaaaagaataggtggtgtcgcaataactacaacgtaaagggcaacctgttagacgaataaatacagtcggtaggccagaggcatttgcttcaccctgcaaggagtaaaaaatctcggtaatgcgtagaccggacgcagggtcagagacaggaattgcagaggaacgtaaggaagccattctagaaataccacactatataaaaaataaaatctctacgatcagtgttgatcgtagagatgtttgatcaaactgaaattagtcagcgcgtaacaaatcgttcaaacttgtttttgcacgtgtttgtgcatcaacttttttcacgataattgcagcgtataagctgtatttaccatcagctgacggtaagttacctggtacaacaactgagccagcaggaacacggccataatggatttcaccagtctcacgatcataaatacgtgtagattgaccgatataaacacccatagaaataacagagccttcttcgacaataacaccttcaacgatttcagaacgtgcgccgataaaacagttgtcttcaataatggttgggttagcttgtaatggttctaaaacaccaccgataccaacaccacctgataaatgaacgtttttaccgatttgagcacatgaacctacagttgcccatgtatcaaccattgtgccttcatctacgtaagcaccaatgttgacataagatggcattaacaccacatttttagcttggaaactaccacgacgagcaacagcaggaggaacaacacgaacgcctgcagctttaaattgctcttcagtccaaccagagaatttagtttcaactttgtcgtagaaacgaagatcacatgactcgattggtttattgtcattaagtttaaatgataataaaacagctttttttaaccattgatgaacaacccattcaccattgattttttctgcaactcgaagtgtaccgttatctaaaccagcaattgcttcttcaacagcttggcgaatttcgcttgggcaatctgctgcagtgaaatttgcgcggtcttcaaatgcttgctcaatgatcgtagaaagctgagacatgatcttccttccataaaaaattttaaagattttacactaatttgtgacaagaatctttgaaaaaacgtgttacgtttaattgaggtataaatgagttaaatcaaaataagcttattagataatcaagtgttttttacacaaaaatgatttgaaaataaaaatttaactcaatttgtatcaaaaaataacagaaatctagcagtttttgtataaaaaagaatctatgctcttgaatataatttttgtcacaagctgaataaattaaaaacagagccttttcttaaggagaaaacgatgaaagtattacgtgttttagtgacaactacagctttacttgctgctggtgctgcaatggcggatgaagctgttgttcatgacagctatgcattcgataaaaaccaattaattccagtaggcgctcgtgctgaagtaggtactacaggttacggtggtgctttgttatggcaagcaaacccatatgtaggtttagcattgggttataacggcggtgacatttcttggtctgatgatgtaaaagtcaatggatcaacttatgaccttgatatggataataacaacgtttatttaaatgctgagattcgtccatggggtgcaagcactaaccgttgggctcaaggcttatatgtagctgctggggcggcttaccttgataacgattatgatttaactcgtaacgttgatgcgactcgttcattccgtgtaaataaccaagactttattgcgggtgccgatggtgtcaaaattaacggtcaaatgtcatataaaaatgatattgctccatacttaggttttggttttgcacctaaaatcaataaaaactggggcgtattcggtgaagtaggcgcttactatactggtaacccaacagttaagcttgtttcgtcaggttctgcagttacaactggtgatcaatcacttgaagaggcagtaaatgcggaagctcgtaaaattgctaacgatgataaatacaaatggttgccagttggtaaagttggtgtgaacttcttctggtaataaagcgtaaaaacgagcttcggctcgtttttttatatctaaaaataaaagagctacttatgtagctcttttatttttcccttaaattttattcatctggataggcaatttttttcaatgctttaatgtcagcatcaggtgagcataaagaaataaactcataaccataaccacgtaataaatggcctttgcgaacagcaatccatgtggtgttgacaccaaagatatcagttttaatttgttttaaacgatagtcacgctctgcatcgtaagcgacatcattgacaattccgacgcccatgccgagttcaacgtaagtcttgataacatcggcatcaagcgcagacattacaatatcggcatcaatttgtgcatcttcaaatgctttatcaatctttgaacgacctgtaaaaccgccgtgataagtaatcagtgggtattcagataaagcatcaagatcaattttatcgagctgtgtaagtgggtgatcttgaggagtaataatgctgtgctgccattgataatatggaatgcttgctaaattttcttcagttgttaaagactctgtcgcgatgccaatatcagcttcaccttgtaaaagcatttctgcaatttcgacagggcttgcttgttgcaaaatcaaatgaacttttggaaatagtttcttaaattgattgacgattggtggtaatacataacgtgcttgagtatgtgttgttgcaatcgttaaagtaccttcgtccactttattaaagtcatcggcaagacgtttaatattttcagcatctacaagcatgcgttctacaatgctaaggagtgattgaccgggttcagttaaacccagcagacgtttacctttacggacgaaaagttgtacgcctaattcatcttctaaatctttaatatgtttacttacacctgattgagaggtgtataacgcggcagatgcttccgttaaattaaagttttggcgtactgtttctcggataattcttaattgttgaaagttcatttacacttttcctcaaaagaggtgaggaacggctttaaataccgcgagatggctcctcaccaaataattccttaagcaacttgatctgcaaataggtgaagttgagatgcacttacccaaacagtttgatttggtttaaatgcatgttgttttgcagcttcactgctcagagcaatctcaattaaacgtccattacgatcttgtaattccgccactacttttccagcaatccagacttcacgtacaaaagttgcttcaattgtatttgcctgtggttgcgcatgaatatgtaactcatccggacgggcaaaagcaattacttttccttgcggtgcctgaactgtggtcggtaattcgatacgatcattgccaatacggataataccgcttgcatgttcaccttcaaaacgatttgcttgacccaagaaatcaaatacaaatggcgttgcaggtttttcgtaaacttcacgcggagaaccaatttgttcgacgttacctttattcatcacaataatttggtcggctacttcaagtgcctcttcttggtcatgggttacgaaaattgaagtgatatgcagctcatcatgcaagttacgtaaccagcggcgtaattctttacgaaccttagcatctagtgcaccaaatggttcatcaagcaataacacacgaggttctacggcaagtgcacgagctaaggcaatacgttggcgttgaccaccagaaagctgggctgggtaacggtctgctaaaaagcccaattgaaccaaatcgagtagacgagtcacacgttttttaatttcggcttccgatgggcgtgtggcacgaggacggacacgtaaaccaaaggcaatattgtcaaatacggtcatgtgacggaataaagcatagtgctgaaaaacaaaaccgacctgacgctcacggacatgtacattggttgcatcttcgccttctagtaagacttgaccaccatctgctgactctaaacccgcaataatacgaagtagcgtcgttttaccgcagccagatgggccgagtaaggcaaccagttcaccctctgggaaatcgagtgaaatatttttaagcgcatggaatgcaccaaagtgtttttcaatatttttaacttgaatactcatgatttcattccttacgaatcagttgaatgcggttctggtttgtcttgatgtagttctaaccaggtttttaaaatcagtgttaatagtgccaagaaagcaagtagtgaggacaccgcaaaagctgcactaaaggtgtactcgttatataaaatttcgacatgaagaggtagggtattggtctcaccacggatgtggccggaaactactgatactgctccaaactcacccattgcacgggcattacacaaaatcacgccgtaaatcagaccccatttaatgttagggagtgtgactttccaaaaggtttgccaacctgatgcaccgagtacaatcgctgcttcctcttcttcagttccttgcgcttccataagtggaattaactcacgcgccacaaatggaactgtaataaagatggtcgctaaaacaatggcaggtacggcatatagaatcttgatgtcatgttccatgagccagccgcctaaccagccttgagcaccgaaaatcagtacaatcattaaacctgcaataacaggtgagaccgaaaaaggcatatcaataatggtggttaaaattgctttacctttaaactgaaatttggaaacagcccatgcagcggcaacaccaaatatcacattaatcggaacggcaattgctgcggtcaatagtgttaatttcactgctgataacgtatctggatcaattaaagcttgaacatagacttcaaggccttgtttaaatgcttcaacaaaaaccagaataagtggcaacatgaggcagctaaggaaaaaaatcagtgcaattgtaatgagcgtataacgtacccaagttggttcacgtgtcgcgtcacgagattgcaatttcaaggcaagtgcattgctgtcggtatgtaggttcatgtgacatttctccctgtacgacggtttgcccatgcttgaagtaagttaatgacaaataaaataatgaaagagagaaccaacatcactgctgcaatagtcgttgcacctgcatagtcatattcttcgaggcgagaaatgatcataagcggagcaatttcagttttaaacggctggttacctgcaatgaaaattacagaaccatattcacctacaccgcgagcaaacgctaaagcaaagcctgtaaatagggcagggagtaatattggtaaaataattttggtaatggtctgccaacgatttgcaccgagtgcggaagccgcctcttcaagttcagtttcaatatcgcttaatactggttgaacggttcgaacaataaaaggaatgccgataaacactaaagctagcgtaatcccgatgggggtatatgcaacctgaataccaaggggttctaaatattgaccgatccagcctgtaggggcatagagtgaggtcaacgcaatacctgcaactgctgttggaagtgcaaaaggtaagtccactaaggcatcaaccagacgctttccgggaaagttataacggacaaggcaccaagctaaaagtagtccgaaaacaacattaataaacgccgcaattaaggctgaactaaagctgagttgaagcgattttaaaatacgttcagaggttaaaatttcccatagtccgtcccatccgattccaaatgatttgataaagactgcggctaatggaataagcacaataaaagaaacgtaagcgagggtgaagcccaatgatagaccaaacccaggcagcactcgggatcgctgcgacatgatatttcctcaaagagaaaagcctgctgaaaccagtaagcgaataaataaagataaacggcgcggtataaagctgggtattaagcaaatttcaaagagaaatgtgtctttaccggatcaatagatgagtggctacacatcgagtcttcaggaagtagatgattcagtaagtcaggaaacggaccgaagcctgaagcaacattaatatgaccgacttgtccaaggttaatcggggttaattgccaagatttcgcaagctgtaaagcatcaaaaaagtctaaccatggatcattttcactaatgagtagcgttgcaggcacattaatttttagctgatgaaaataatctttgtagtcagtcaaactatggcgggcaaatccggcttcaccaaaacgtgccggatttgcaggagcaaccaaaatcagttttttaacttgaagttgtaactctggatgctctgctaaggcagcaacactagttaggcagccgaaactatgcgcaacaatttggactggtgtttgtactgcttgaactgtgttaacgaattgctcaatccattcgcttaatacgggtctatcccagtttttttgctcaacgcgagaactagacacgagttgacgctgcaaccaagattgccaatgttgatgttcacttccacctacacccggaacaattacagtgtgtgtcatgtctgttctccttatcgttagaacaaagaattacttctctgcactattgattttcacgatttgatcgaaaacaccaccattatcaaagtgttgtttttgtacttttgtccaaccgccaaattctttatcaatggtgacaagtttcaatggcttaaatacattgctgtattttttgagtacagctgcattacgaggacggtagaaattacgtgctgcaatttcttgaccagcaggtgagtacaaatagttgaggtaaccttttgcaatagttaagttgccttttttcgctgcatttttttcaacaattgcaactggcggctcagccaaaatagataaagatggcgtcacaatctcaaacttgcctggttgttcacggatagctaaatgtgcttcattttcccaagccagtaatacgtcaccaattccgcgttcagcaaatgtagtggttgcaccacgggcgcctgaatctaaaactttggtgtgtttataaatttggcgaacaaattcttgtgcttttgcatcgttaccacctgcttgatgttttgcccaagcccaagctgcaagatagttccaacgtgcaccaccagaagttttcgggtttggcgtaataatttccacgcctggcttgattaagtcaccccaatctttaatttgtttagggttacccttacgaactaaaaacacgatagttgatgtgtacggagtagagttttgcggtaactttttctgccagtctgttggaagcaattttgctttttcagcaatttcatcaatatcagcagcaagtgctaatgtcacaacatctgcatttaagccgtcgattacagcgcgggcctgtttaccagaaccaccgtgtgactgtttaaactcaatatcttgaccggtacgctgtttccagtaagtaccgaactgtttgttgaaatctgtatataactcgcgagttggatcgtaagaaacgtttaagaattcttgagctgcaaacgatgaaacagaaagtaatgcagcaataaccccgacttttaactgagaaaaacgcatgagataacccctcaaaaaatacgaaatgttcaaaacatgaacgcagaatagcgctagtctttattctaaaaaaataataaaaaacgaatttaatatgaaaaatatagaaataataaaaatggataagttattcttaaatcttgatatataacaagtttcaaaagtttctcttaaatcggtataattttttaaaatcagtcatttattaattaaatgaaaggtgttgtattgttgggtggttttaaataaaggacggattaagcatgtggtgttttaaaaatggacaacctgtagagaccattcctttattggaccgggcatttcattatggggatggctgctttaccacaattcgtgtttttcaaaataagattgagcttaaagcacggcactgggaacgtctaaaacttgcttgccaaaaattatctttggttgcagattttgagttaatcgaacaaagtttgcagcatctacaaaatcagaatctcgtgctcaacgggactttaaaaattgtgattagccgtggtgaaggtgatcgtggctatagtttgccaaagcatgcggcagatatttatatctggttttatccaaaagcattggagcagttccaaccagattttattgagtgtggagttttaaatcaggctttaggtttaaccatgccgagtttagttgggcttaaatccttaaaccgtcttgagcaggtattgctaaaaaaagaagcagatcaacaaggctgggttgaagctttagtaactgatgtacaaggttatattgttgaaggggtaagcagtaattgttttattcgtttaaatgatagatggattactccggaacttcgctataatggcgtccacggtgtgatgcgtgcagaaattttggcgcgtatgcagcactacggaattgcctgtgaagtcagaataattgagctagatgaagtaccacaaatacagagtctattcttttgtaatgctttacatccaatgcgagtagttactcaaatcagtgaacaaattctagagtcacaggcgtgcctaaatttatttcatactcttaacttgaatcagattcattaatatgccgaagccacctgtgaatgcgaaagcaaaaaatgctaaaaaaaagggcaagaaaacagcatctaattttccaaaaaagttagtgctgattggctgttttatcgttttaatttctatttttgctattttatggtcaagtttatttaaagcttatcctattgaagggaaaaagcagatgctatcgatcacatcaggtgagacctattctggttttattgatcgcttagccaaagaaaataaaatccatttcccaattgtacttaagctttatcaaaagtttatgattcatgacagtatgaaagctggtgtatatgagatagagcagggaatgagcgtaagacaagtattagagatgttatctgatgctgataatgcccagatgaaccgtgttctagtgattgaaggaacaacttttaagcagctgattacagcactaaaaaacgataaaaatgtaaaaaatacgatattggatttaccagatgaccagcttatgaaggctttaggtattccttatcatcatcctgaaggtctgtttgcacccaacacttatttctttgctaaaggtgagaccgataagaaaatcctgactgatttataccatcgtcaaatgaaagccttagatgcggcttgggcaaagcgggcaccgaatttaccttataaagataagtatgaagctttaatcatggcttctattgttgaaaaagaaacgagcctcgatagcgaacttacacaagtttcaggggttttcgtgcgccgtttaaaactcggtatgcgtttacagactgatccaaccgtaatttatggtatgggtgcaaactataagggtaatattacccgcgaagacttacgtacaccaacaccatataatacctatacaattaatgggttaccgccaactccaattgcgctgccaagccaaaaagccattgaggctgcgttacatccagatgattcaaataacatctattttgtagcgactggtaatggtggacataaatttacggcagacttgcaagcacataaccaagcagtgcaagagtatttatccgtgttgagatcgaagaaataaggaaaagagatgtttattagctttgaaggcacggaaggggtaggaaaaactacactcattcgaaaaattcatcagcattttgaagaacaaggtaaacaagttgttttaactcgagagccgggtggaacaccactcgcagaacaaatccgttcgatgcttttggcagtgaatcatgatgaaaatatgagtcatgatactgagttgctcttaatttatgcggcacgagctcaacacttacaacaagttattttgccagcattagagtctaataaaattgtattaagtgatcgttttaccgatgcgagttttgcttatcaatgttccggtcgtggtttaagccaagacaaattacagcttttaaaccagaacttcgtttcacgcatgccagaagtgactttctggttagatgcaccaattgaacttggtatgaaccgtgcacgtgaacgcggagctttagaccgttttgaacaggaaaagttaagcttctttactaaggttcgtgaaggatatgaaactttatggaaagctgagcctgagcgtattaaacgtttagatgctacacaaagccctgatcaggtgttcgagcaagctctacaatatttagcataagccatgggattacccactctcatatttttttgggagtggtgaaaaatgacaagaaatctggttttaaacgtcatagaaaatattgggcagtatcttatgctattttaattactgtttaaaattgaagaataacaaggatgaaaagctcaaaagaagaaattgtggcatttcttgaaaaggaattcccacaaagtttggaacattgcacgattgaatcagtcacttctaaagctgccgttgtttattatcatgttgaccaaagacatcaacgtccgggcggtactatatctggcccgactatgatgactttggcagactttgctttatatattgcaatactcggtgaaattggaattattggtttagctgtaaccaccaattttaatattaatttcctgagaaaacccgcaggtgatcaagacttacgcagtgaatgtaagctcatgaaagtaggaaagagcttagtcgtaggtgaggtctggatttattcagtagggcaagaggaacccgtggcacatgtgaccgcgacttactcaattcctcctagaccataaatcttaagtaataaaaaagcacggcatgaaccgtgcttttttataaaaaactatttatacactcgtattcaccaaaggttgctctactgcaaagtttggaggcgtcagaaccgttttacgaatctcactcgaagtttccggataatcaagtgtgtaatgtaagccacgtgattctttacggtgcatagcacaacgaacaatcatttcggaaacaagtacaagattacgcagttcaatcaggttcttgctgacacgataatcttgataatattcagtaatttcgcgctttagcatttcaatacggtgtaacgcacgttctaaacgttttgtggttcttacaataccaacgtagttccacatggtcgaacgtaactcatcccagttttgtaaaatcacgacatcttcatctggattggttacttgagaatcgtcccaagtgggtacttccggtaatttgaagtttatatcaaacttactttcgatatcttttgctgcactcatgccataaacgaagcattcaagtaatgagttgctcgccatacggtttgcaccatgcaaacccgtataagaggtttcaccaattgcatatagaccttcaatatcagtctggctatttgagtcaaccacaacaccaccacaagtatagtgtgcagctggcaccaccggaatcatgtctttagtgatgtcgatacctaactcaagcaatcgtgcataaagtgtagggaagtgctctttaataaactcaggtgatttgtgtgtaatgtctaaccacacatggcgaataccgagacgcttgatttcatggtcaatggtacgtgccacgatatcgcgaggagccaactctgcacgatcgtcaaaacgtagcataaaacgttcgccatctggtaaacgtaagtaagcaccttcaccacgcatggcttcagtaattaagaaagaacgtgcttgtgggtggtaaaggcaggttggatggaactggttaaattccatattggcaacacggcaacctgcacggtatgccatcgcaataccgtcaccagtagcaatatccggattagatgtataaaggtaagctttcattgcgccgccgcaagcaagtgcggtaaatggggcaaggaaggtatgaactttttcagtactttcatctagtgcatacaaaccaatagcacgatttgcctgctctgtatgacctaacttatgcgacgtgattaaatcaatcgcaatatagttttcaaaaatagtgatgtttttacgttctttggcgcgttcaaccaaagtggttgaaatagctttgccagttgcatcagcagaatgaataatacggcgctgcgaatggccaccttcacgagtcaaatgaagctgttcatcttcatctaaggtaaactgcacaccttgctttaaaaggaaatcaacagaaggacggccgccttctacagtatgctggactgcatccatttcacataaatgagcacctgcaatcatagtgtcattaatgtgttgttgaatagagtcagtttcatcaagtactgcagcaacaccaccttgtgcatagaaggtacttgcttcagttaaagcagctttagctaaaactgcaatattaaaatgacttggtaacgataaagccagacttaaaccagcaccgccactgcccacaataatcacatcaaagtggtgaattgtctgttgattaggcatgtccattcgcatcaatttaaaacgtccgctaatgacacccctttttacctaaaaaggcaagagcttaagcgctctaagtcacagaaaaattgcaattagctttaaaaattgcaatgtgtaaaataaacgtgatgaggatgccttacaaataaacatattgttacgcacaattccaaggcattgtgatacaaaagttttattcttattctcgtagaccaattgtgggtgagcaccgaatgaaatctcgctatttacaacaaggaatgtatgcagcggtatttacagttgctgctgttcaagcaaatgctgctgttgatttttcaaacctcgttgaacaagttagtccggctgtggtgagtgtaaacgttgtaaaaaaaatgactcaggatgaactgttacaacagcaagttcctgaaattttaaaacgtttctttggtaatcaggtcatcattccacagcaacaaggtcctcaagagaaaaccgcatatggtagtgcgttctttattagtaaagatggttatttacttacgaaccaccatgtaattgaaaatgcttcccgcatcagtattactttaaatgaccgtcgtgaaattgatgcaacggtggtcggtagtgatgagcggacagacgttgcattattaaaggtaaacggaactaactatcctgctttacgagtaggaaatgttgaccgtttacgtgtaggagagccggttttagcaattggttcaccatttggttttgattattcagcttcggcaggtattgttagcgctaaatcacgtaacatgagcggtgaaacctctgtaccatttattcaaaccgatgtggcgttgaaccctggtaactcaggcggtccattgtttaaccagaatggtgaagttgtcggggtgaactcacgtatctttagtggtacgggtggctatatgggcttatctttctctattccaattgatgttgcgatggatgtagctgaacagcttaaaacgaaagggaaagtgactcgttcatacttgggtgtcatgatgcaagatattgaccgtaaccttgcagatgcctataaattacctaaaccggaaggtgctctgattactcaggtttctccaaattcacctgctcaaaaagcagggcttagagctggcgatgttattctaaaattaaatggtgcttctgtactgcgtactagtgatttgctttatgcattaaataaagtacaaccaaaccaaactgttcagtttgaagttttacgtgatgataaaacccgaaatatctcggcaacactagcaactgcacctgatgaaacaccagctaccggtaatcaagcctctgcttctaaaggtccagtattgggaatgagtattcgtgatctcgctgtgccagagaaaaatgctttaggtataaaaggtggtatttatgtacaagatgtccgccgtggtggattagcatcattgtcaaatatcattcctggcgatgtgattattcaggttaataatactcagattttgaacagtcaggattttgcaaaagttgtttcgaatttgccgaaaaatacagttgcgcgagttgggattattcgtcaaggacaacgagcaatgcttggtttacgtattcagtaaaatattataaaaatgaaccaccctgaaaatgggtggttttttattatttgtattcggcataatgttcgatctagctaattaaattttagctttgaatttaatgattaaagtgggtgttttgtgagcagtattttcgatttacatattcaggttcagccacagcatattgatgctttagggcatgttaacaatgtaatgtatgtccagtggatgcaagacgtcgctgctgctcatgtggaaacattaggggtaggagtaaccaaatatctagagctaaaacatgcaatggttgcggttgaacaccatgtgcaataccgtaaagctgcgtttgaaggggaagaaattgtgctgcggacatggctagatgatattaatgctctatattcatttcgtcagtatgcttttttccgtccttctgatcaggcaattttgttcgttggaaataccaaatgggcatgtattgaaattgcttcaggtcgacctaaacgtatgtcgccgacttttacacaggcttataaacctcttgattcaagtataaatcctttagattttactgtttcatatgcccgataatcagaagcattacttgtactttgaattatcattttttaaaacataagtacaaagctcatgaattttggatactttaaaatatccatctgctataatctctcgcaatttgttaaaccgctttggctatgtattaaaacaagctacatagcactttatattttctcaaggtagcccatggcgcaagctaaaaaatccgttgatatcaaaaatatccgaaatttctcgattatcgctcatattgatcatggtaagtctactttggctgaccgttttattcagatgtgtggtggcctgcaagatcgtgagatgcaagctcaggtcttggactcaatggagctcgagcgtgaacgtgggattaccattaaagctgcttcggtgacgttgtactatactcatccaaacgggcaggaatatcagcttaactttattgatactccgggacacgttgatttctcttatgaagtatctcgttcattagctgcttgtgaaggtgcgttattggttgtggatgctgcacaaggggtagaagcacaatcagttgcaaactgttataccgctattgagcaaggtctcgaagttcttccaattttaaataaaattgatttgccgcaagcagagcctgagcgcgttattcatgaaattgaagaaattatcggtattgaagcaaccaatgcacctacatgttctgcaaaaacaggcttaggcgttgaaggtgttttagaaacattagttgatgttattcctgctccaacaggtgaccgtgaggctcctttacaagcattaatcattgactcatggtttgataactatttaggtgttgtctctttagttcgtattaaagatggtcgtatccgcaagggcgacaaaatgttggttaaatctaccggtcagactcatattgttacatcggtaggtgtattcaaccctaaacatactgaaactggcgtgcttgaagctggtgaagtaggctttgttatcgcgggtattaaagatatttttggtgcgccggtaggtgataccatcacgctttcaacaacccctgaagtagcttcacttcctggttttaaaaaggttaaacctcaggtttacgcaggccttttcccaattgatgcaagcgattttgaaccattccgcgaagccttacaaaaactacagatcaatgactcggctttattctttgaacctgaaagttcagatgcgcttggttttggtttccgttgtggtttcttgggcatgttgcacatggaaatcgtacaagagcgtttagagcgcgagtatgaccttgatttgatcagctcagcgccaacggtagtgtatgaagctgtcactaaaaaaggcgatacgatctatatcgatagtccatctaaaatgccggatggttctgttgttgaagatttgcgtgagccaattgcagagtgtcatattcttgtaccgcaagagtacttaggtaacgtcatgaccctatgtattgagcgccgtggtgtacaaaaagacatgaaattcttaggtaatcaagtttcaattacttttgaaattcctatggctgaagtggttatggacttctttgataagcttaaatcatgttcacgtggttttgcttcacttgactataactttattcgttttgagagttcatctttagttaaggttgacgtgttaattaatggtgagaaggtcgatgcgcttgcaatgatttgtcaccgtaatgatgctcgtcatcgtggtattgctttagttgagaaaatgaaagatttgattccacgtcaaatgttcgatgtcgcaattcaggctgctattggtgcacaaattattgctcgttcgaccgtgaaggcgatgcgtaaaaacgttttagcaaaatgttatggcggtgacgtgtctcgtaagaagaaactacttgcgaaacaaaaagaaggtaagaaacgtatgaaacaagtgggtagtgtagaaatcccacaagaagcgttcttagctgttttgaaagtagaaagataagagaaaaggctgggatgaacttatattctcccagccgcaaggcaagcagctaagctgcgagtgaggtcctgtggattttgattttaatttaattcttgttcctgttacgctgattttatttgcagtgtggttgctagataagcttgtttttaaacagcgtgcaaataaagggcgagagaacgaaaattttgttattacatgggcctatgacttttggccggttttagctgttgtgcttgtacttcgctcatttctttatgaaccatttaatattccatcagactctatggttccgaccttagagactggcgattttattttagttaataaatttgactatggtgtccgtttacctatcgtcaataaaaaagtgattgatatcggtgaaccgaaacgtggtgacgtcattgtattccgttatccgccacaacctactattagttatattaaacgtgtaattggcttacctggtgaccatattgtttatgatcatggacaattgattattaatggtcaaaaaattcctaaagtaccaacacagtttagtcgcgaaaaagatgctttagatacaccaacttctatttatcataaagaaacaattggtgatcatacttttacgatgcgtgagcttgaaggcgtaaatgttgcgcgtcaggcaccatttatcaactatgttgataatggtaaatatgcaaaccaagacggtttatattgggaagtaacagttccgaaaggacattactttgcaatgggggataaccgtgatcaaagtgctgacagtcgtttctggggctttgtacctgaagaaaatttaacaggccgagctttctatgtctggatgcataaagaacctggtttccacctgccaagctttaaccgaaatgggaaaatagattaaaaacaaccattaggaaaacaaaaatgcgtaaggcacaacagggtacttcgtatttagcaattttatttggggtggtcatatttgcaattgcggtgaaagccgtacttgcagtttggccagcatattgggatgatcgtgtgattaataatcagattacagagcttatgcaacaaagctcggctgatatcacaccccaaaagtttatgacacagatggaccaacgactggaaatgaacaacattcgtgatctgcattttaaagagattgctgaagtgtttaaccagccaagtctaacagtcaaaaagaaatatgaggtaagaaagcctttcttactgaatattgatttagttttaacatttgagaagagttttgacaaaacatcagttcaagctaagtgatcctcgcttactcagtcgaatcggttatcaatttaagcagcctgaattgctacagttggctttgactcatcgttcggtgagtcataagtataactacgaacgtctggaatttttgggcgattcactgttggggatgattatcgccaattatttataccatgcgtaccctcatgaaaatgaggggcgactaacgcgtatgcgcgcgactttagtacgtcaggaagcattaggtaaaattgcaaccgatttgcaacttagtcggtgtttaatattaagcacaggtgagttgaaatctggtggtcatcatcgtgagtcaatattggctgacacagtggaagccattattggtgcaatttatcttgatagtagtgatctgaacctactcaaagatattgtgttaaaatggtatacgccttatttagatcatattgagccaacagatcaactcaaggatccaaaatcacgtttacaagagtatctacaagcacgtaaaaaacctctccctgtttacgaggttgtagatattcagggtgatgcgcctcatcagcactttaaagtcgaatgtttggtagatggtttatcaaaaattcatggtgaggggtcaagtcgtcgttttgccgagcaggcagcagcggcggaaattttaaagttattggagcaataacctgcatgtcgatgcattctgatcaaatcaatccagattcaaacgaaaaccaagatccaaacaatctgattgatcaattttttagttccaaaggcgttacaattccttcggattttaagagcggatttgtggcgattgtaggacgtccaaatgtgggtaaatctaccctcatgaaccatttattgggccaaaaactctctattacttcacgtaaacctcaaacaacacgccataaaattatcggtattgattcgcgtgaaaaaatgcaagcggtttatgtcgataccccaggtatgcataagaaagaagtacgtgcaatcaataaaatgatgaaccgtgctgcgcattctgcgttacgtgacgtgaatttagtcttatttgttattgatgcccagaagtggactcaaaatgacgatttagttcttgagaaactcaagaatgctgatatgccagttattttggtgattaataaagctgatacttttggagataagagagagattctccctttaattcaagaacgtgccaaacttatgaattttgcggagattgttcctgtttctgcactccgtggagcaaacttagagcacttaagtgaaacgattgaaaaatatcttccttatcagccacctttatattcaatcgatcaaattacggaccgttcagagcgcttcttggcaagtgaaatcatccgtgaaaaaatcatgcgtcagttgggtgaagagctaccttatgatttaacagtacaaattgaatctttcaaaacggaagaggcaactgttaatgaaaaaactggtcgtttaaaaccagcatgtacctatattgatgcaactatttttgtggatcgtcctggtcaaaaagcgattgtaattggtgaaaaaggtgccaagcttaaaacaattggcatggatgcacgtaaagacatggaaaaaatgttcgaacaaaagatcatgcttaccttatgggttaaggtcaaaggtggttggtctgatgatgaacgtgctttaaaaagtttaggatatagtgatatctaaaaagtagggaatactggtatgaaagcaattacatcaatattgattatcgttggatgtacattgatgttgcaaggttgtgtatataagcttgtaaccgtaccagtaggtattgcttataaaacgactaaaggtgtagtgaagggtacagctgctgttgtaggggctgtaattcctgatggtgatgacgacgataaaaaagaaaaagaatctgaggaatagtttctttttatgatgcgcaatgaagtcctacatggatatatgattcaccatcgtaaatatcgtgaaaaaagccatattgtgcatctcttcactcaagaatatgggcgggttgatggtattttaagacagactccgcctcctcaatatcagccaatccgtttgcaagccacaggcaaaagtgaactcaaaaattttacaaagctggaaatactaaatcagccggttttcttttttggcgatgctttttttgcagggttctatttaaacgaaattgttcttagactttgcccactagaagaggcaatgccacaaacttttgaacaataccagttaacgctgcttcaactccagcagctatcttctcatgaaaatccggatttatttcttagacagatcttgaggcaatttgagcatatcttgcttgcagagctaggctatgcgattgatttttcaattgatagctcacaaaaagaaattttgtctcaacagttttatcagtttcaagtgaatgaaggatttgcccccgttgttcaggcaagtcgctcatcgttgtcaggaaaagcaattttatccatgctgaattatgagcagggacaggatttttctcacgaacaattgcaattattaggtaaactataccgtcaaatgattacatcgcttttaggtgaccgtcccctaaaaagtcgacaattgtggattcaaaatactcaaactcaatcgtaattaggatttttttatggctgcattgcttggtgtaaacatagaccatgttgctactttaagacaggcgcgcggtactgcttacccagaccctgtagaagctgctcttatttgtgaacaagcgggtgcagaggggattactttgcatttgcgtgaagatcgcagacatattcaagatgatgacgtacgtcgtatgcgtccattattgaaaacacgtatgaatcttgaaatggccgtaactgatgaaatggttgagtttgcgaaagaaattcaaccgcaacatgtgtgttttgtaccagaacgacgccaagaagttacaacagaaggcggtttagatgtagtaggtaactttgaaaaagttaaagctgcaactcaagccttagctgccattggttgtgatgtttcactctttattgatgctgattttgctcaaattgatgcagcaattgcttgtggagcaccaactattgaattacataccggggcttatgcagatgccacaacagatcaagaacaacaagaagaacttgctcgcattgtcaaaggtgtggaatacgcagcttcaaaaggtttggttgtaaatgctggtcacggtttgaatctgaaaaatattgctccaattgcggcaattccacaaattcatgagttaaatattggtcactcaattattgcggaaagtgtttttgttggactagcacaggcggtgaaagacatgaaaacagcgattcaggcagcaggataagtagtaatgtcgagtatcaattacgatgaattaatgcagcctgtattagcatttttagggtgccaaaccccaaaagaatggttggatgaggccgttaataatttagacatcttgatgcaagatcatgctaactgtgagaaaaaggcagcgggtacggccatgaacttaatgttccgctatagttttttcacggacttacaagttaagcttgcccagcttgtacgtgaagaaatgcttcactatgaacaagttctagaatttatgacgaaacgtgggcaagagtggaaaggtttaagtgctggacgctatgcaggtggcttacgaaaagaaatccgcacatatgaaccagaagctctaattgatgtactcgtgattggggcttttgtagaagcacgttcatgtgaacgtttttatgcgcttgctccgcgtgttgatgatgagttaggacgttattaccgttacttgcttaagtcagaatctcgtcattttgaagactatttagcactagcgcttgacgtcgcaaaaactgccaaaatgaaagatcctgaagaagatattcaacagcgtattgaacatatccgtgaagttgaaaagaatctgattttgactccagatgatactttccgttttcatagtggtatccctgcataagcttggatacctcaagttaaaaagtttacctttcacggtaaacttttttattaagtagctctaacttctaaatagtttgagtcgatatttaaggttaagtaaggaccattttttagttttttaatgcatatcattatttaataaatatattttttacagatttaaatttctcttaaaatttttaaaaaaacttttatttttttaggctaataataaatattgtgtaaatataaaggctgatatgtttatcatgagttcaactgaagcagttgattatttctaaggatataagaatgttagcattagttacaggcgcatcagcaggttttggttatagtatttcaaagaaactgattgagtcaggctataaagttattggatgtggaagacgcgcagaaaaattagaagaactacaaaaacagcttggcgaaaatttctacccactcgtatttgatatgactgatacggcagaaaatataaataagttatttaaagaattaccaaatgaatttcaaatcgatcaaattgacttactagtgaataatgcaggcttggcattgggtctagagccagcagataaagcggatttagatgattggtacaccatgattgataccaatgttaaaggccttgttacggttacccgattaattttaccaagtatggtaaagaagaaatcaggcttaatcattaatatgggttcaattgcaggtacatacccatatccaggtggtaatgtgtatggggcaacaaaagcttttgtagagcagtttagtttaaatctacgtgcagatttggctggtactggcgtgcgagtaacgaatattgagccagggttgtgtggtggtaccgaattttctcttgtacgttttaagggggatcaggagaaagctaatagtctatacgataagaaaaatccaattttgccggaagatattgcaaatacagtagcatggatcgcatcacaaccaccgcatattaatattaaccgtatagaaatgatgccaacgactcagacttttaaccctttaaaagttgtagaagtggaataatgtaattttaaaaagatctaagcgtagaagatcacctaagtttagaactgatgattcgatctggtaaatattcgaattatgaaaagcaaatcctctacaggcagcaggggattttttttataggtatactgtaatagagagcaataaaaaagcccgctttaatgctgcgggctttttagtatttggctctcccacctgggctcgaaccagggacctgcggattaacagtccgtcgctctaccgactgagctatgggagaatctgcatgcgattataaggagattttgacaagggtcaagtaaaaatcgtcatgtttcattcatttttgtgttgtatgctttttatttgatcagttgaaaggtgagaccataaattacttgcactttgaaaattcaattgctagattcagaaaagaacaagcgtttggagtaatccaaacagtgtggatttaaaccaacttgccagcactaaaatggctaaatcggagataagtatgaaaacacttactgttgcttctattttttctaattttgatttttatcaacgcaattatctcaatattttaaatcaaccagaatcttattacacacctgtagaagatgcatggatcgatgcttttccatttaaaaaacaagatttgtacttaggtgacttactacaactctggtttagttcaaaatgggatgtgcatacttcgttgaaagttttaaagtgttccaaggtagtagatcaatctaaacctctctatattttccagctcgaaggagaattattcctaggtaaaaataaagttttagcctggtctactcagcatcataaagtgatagagcttcaacttaagaatatttgggcgccttatgtggttgcgaaaacttgtgaccgcccagatattccttacttaatgaaaaaggcagccgtttaaagctgccttggtttttatggtcgaataatcatgcaggttgctgttgcataagcataaagtttgccttcttcatcagtaatttttccttcggaaatacctaaatttttacttaaattgatcactttacctgtagcaattaaaacctgattttgtggaagaggacggcacattttcacattaagatctatggttccataacccacaccggcaggtagcattgtatgtacagcgcagccagtcactgaatctagaacagttgcagcaaaaccaccatgtacaccacctaaaggatttaggtgattatgatctgcttgtgctttgaaagttacagatccttctgaaatctcagtaggttgcatcggaatagttttgctaatactggcaggtggaatatgaccttcaatcatggcttgtaaaaattcgaggcctgtcatttccataggatttttcattttttgagtccttcagttattaaagttctaaaatggaacttgatgttaaattaggcgttaaattaactattgtcaagttggagtgaatagaaagataggtcacttatagtttataaacttgtaaaatttggttgagcagaatattttataactctaaaaatataaactttttgtggaaaataataatgaacggacagtgtttatgtggtgaaacagctttcgaagttgagttaaaaaatcatgatgtacatgtttgccattgctcgatgtgtcgtagacaaaccagtggtgtcattatgacagttgatgtagttaaaggtagtttaaagtttattcagcaaaagcatcttagtgtatttaactcttctgaatggggtgaaagaggcttttgtaacgcttgtggaacaataattttttggagaacaaaagatcaaagttactgcaatatcaatgtgttttctttaaatgaaccagtaaaagacttgaaattagatatggaaatttttattgattcaaaacctgatttttataattttcagaatgatacaaaaaaactgactgaggctgaggtggcagctttatttaatttagaataattttaattataaaaaaggcctcaattttgaggcctttttttatattttcaaattatttagcagctttttcagcttcgatagatgcaatcgcagcatcaacgccttcgattgattcagcagcttttttgatacgtgctaacgcatcaacaagtacttcgtcagctgttgcatatgaaatacgcatgaaaccacctaaaccaaatgcatcaccaggaacgaccgctacgccagtttcttcaagtaaccattcagagaattctgtgcaagattttaagccttttgcacgaataagagggcgaatgtttgcatacgcgtagaaagcgccatcagcaggtaagcaagagatccctttgatgtcgtttaagccattaaccactaagtcatgacgacgtttaaacgcttcaatcattggttttaaaacatcttgtggaccattcaacgcagcttcagcagcaacttgcgaaattgaagtcgggttagaagttgattgagactggatttttttcattgcaccaatgatttttgctgggccggctgcatagccaatacgccaacctgtcattgcatatgctttagaaacaccatttaaaacaatcgtgcggtcatataaatcaggtgcaacagttgcaatattgtagaactcatcttcccaacgaattggttcatacatgtcgtcagatgcaacaaatacttgtggatgacgacgtaaaacttcagctaaagcttctaattcagctttgctgtaaatcatacctgtcgggttagatgggctgtttaataccactaaacgagtgttaggagtaattgctgcttctaattgttcaggtgtaattttgaaacgttgctcttcgccacatttcacgataacaggcgtaccttcagcaataatgaccatatctggatagcttacccagaatggcgcagggatgatcacttcatcacccttgtttaataatgctagtgccaagttaaagaagctttgcttaccgccacaagaaaccaaaatctggttaggttggtaatcaagattattatcacgctttaatttagcaataattgctttttttaacccaggagtaccatctacagccgtatatttggtgaaaccattattaatcgcttcaattgcagcatctttgatgtgttgaggggtatcaaaatctggctcgccagcacccaaaccaatcacgttcttaccagcagctttaagctcagcagctttattagttacagcaagtgtaggggacggtttgatagcattgacacgatcagaaagacgtacgtccacggcaatattcctcttatgggattaaaaataaaaagcacactatcttatcgcaaaaattaagcaatttgcggatggggggatttttagatgtaaaaaagtttaatttaggaaagatcttgttgcggttttattcaattgaagcttttttcgaaagaaacaagaaaaatcctttataataagccgcaatcgaaatatcgagaatgaatcatgactgagcaacagccaaaacagaaaaaggctttggtgaaattgccatttccaatgccgaatgaaagtaaccaagcaggcgatgctgtacacaaccaagtacgtccgaaacctgaacaatatgcagatagaacttggatgccaccgcgtggtactcgtcgttctatgggtaagcgctaatttaaataaaaaaacaggcaatatgcctgtttttttatggtagaagaatttcttgataataactttttttcttttgatacatatgatgatctgcgcgttttagcatatcttcaacttgttcattttcttttgttgtggcgtgcccaattgcaatactaatagggtgacttgaataatattgattatctatattaaaaagctcctgaatggtttgcagcatcatcaaaacattcgcttcatctgcaccaggcattaaaatgacaaattcgtcgccaccgattcgagaagctgtataagcagtattcataattgcctgatttaaaatattacctactcgacgtaataaaccatcaccaatatcatggccaagttgatcattggtttcctttaagccgttcatgtctaaaaaaattgaagaaacagggcggataatactgcgatttaaacgattaagctcttctgtaaaaaaagctcggttataaagtttggtcagtacatcatgctggcctaaatattctagataattttcggctttctttcgtgcagtaatatctgtaagtgcaacctgtaccaatccccaagtctcttcataaccggggaatacggtaaattgcagtaagacatttctgatttgaccatctaacgcatagttaacggcttcacgcttgtggtgaatatttccttgccagagttcaatcagctgttctctaaaagtttccaccatctctttggcaaaaattttatgggtattttttaacagagtggttttatctggtgctttaaataaatcgagagtcgactgattgacgtctaaaattaaaatgtcttctatgcattggcgaacaaattcaggatgtacatctaaaaaagttctaaagtcttcaattcctaatagcctaagctgatcaattctatttttaatacggctaaaatcttcaacccaaagcgaagtcggggagtagataaacattgactctgctaggcgtcgatttttctcttcctgacgaagtgcattttgatacggagtaatgtcttcggtggtaattaaaatacggtcaaacgtagtttcagaacccggtaaaattgctccacgtagttgtacatcaatacgtttaccagagagcgtgtaatttatagtggtactcgagaaatgagttttgccattccataacgcttcgagttcatgaatatgagcttcaaacatttcttttttaaaaataagatttaagttggcacataactcttcttggttttttgcttcaaaaaggtctaatactttttggttgaccttaataattttaattttatgagcacattcaaccactagattttcattttgacttagaaattcatataagttttcaaccccttgatttctccataagtcaaataactgcttaacttcactaaagtcttcaatccacattggaattggggtgaggtcaaaaattgaagaatctaaagtttccatgcgtttcttttaagtattcagtttgtcttaaagtataatgagaaaaactaaggtttgggaaataatcgatttaaatctattagaataattaaaataaaaatattaaatataagtaaaataatgagaaagcagaatttatctgcttcactcataaaatatcaaagtaaattaacggttaatagggtggtcgatatttttctcaccgcgccataattttataaaatcttgctcatcaaaatcataaagttccataagcgcaacaattacacttacgaaaatcattgcaccttctgagttaccatgaatattaaaaatcttaccattgagtttacctaaaatatccctcaattcgtggtcacggcctctgccatagcggtcacgaggatacaattcctcattaagcacaataagcgctatcgctttttcagcacgtgataaatccgttttatctaaagcatcttcaaaagattcactggcgtgattaaagtaaaaaataacttcatcattaatgaaactttgaaccattttttgagtgagtgttgggaactgtgaaacagcatcttcttcaacatacggtttaaacgattcaggaaaaatcacattgtgatgtatgcctttaaaaagaggagcgatttcggaaaccttataacctgcgatcccacatcctaaagctgtcacaaagtatttcattttaggatgattttttgcataaactttaaagtcttcaacataatgctcgatttgggagagtggcatttgttggatatgttcatttaatgttggaattgcaaagctctgaccagcccagccacgtcctacaccctctacagccccaaaatgctgactggcaacacgtgcggctccactaccatgttgtccagccatattactaccgaagacaaacacggtatcttcagggagttcggttacaatactttcatcatgatattgataggtcatggttatgctttttatctaatggataagtccatgttgcaaccgtttacagcattggtcaagtatcaagatgcttaatattttcgatatagattaatctcactatagactttaaattagggaaaaaatccccattaatttgctagacgataaattcaaattttttataaagagagagaactgtgaacgaaaatcaacctttcgatttggtcactcattaccagccagcgggtgatcagccacaggcaattgaaaagctggtgaatggtatcgaaaagggttttcgtaatcagttactgctaggtgtgaccggttcaggtaagacctataccatggcaaatgtgattgcccaaactcagcgcccgacgattgtgatggcgcataataagaccttggcagcccagctctatggtgagttcaaagccttcttcccaaacaatgcagttgagtatttcgtaagttattacgactactatcaacccgaggcttatgttccgtcatcagatacatttattgaaaaagacgcagcaattaatgaccatattgaccagatgcgattatcggcaacgcgtgctttgttagaacgtcgtgatgcgattattgttgcttctgtttcggccatttatggtttgggtgacccaaatgcttatatgcaaatgttattgcatgtggtccaaggtgatcgagtaagtcgagacgaaattattcgccgtttggttgaaatgcaatatacccgtaatgagcttgaattcttacgtggtacgtatcgtatccgtggtgaaattattgatattttcccggcagaatccgaccaacatgcgattcgtattgaactctttgatgacgaagtagactcaattcgctggtttgatccgcttaccggtaaaatggtccgcaaagtaccacgtgtcacgatttacccgaaaagccattatgtgacgccaaaagacaacctaacacgtgctatcgataccattaaggatgaattgcaagaccagcttaagttcttccgtgaacatgataagttactcgaagcgcagcgtatcgagcaacgtactcgttatgatttggaaatgatgcagcagttagggtacaccaatggtatcgaaaactactcacgtcatttatcgggacgaccggcaggtgaagcaccaccgactttatttgactatgtaccagaagatgccttacttattattgatgagtcgcatgtaacggttcctcaaattggcgcaatgtataaaggtgaccgttcgcgtaaagaaaacttggtgaattacggtttccgtttaccaagtgcgcttgataaccgcccaatgaaatttgaagagtgggagcgtattgttccaacgactatttttgtgagtgccacaccagctagatatgaactggaaaaatcagaacaagtggttgagcaggttgttcgaccaacaggcttgattgatcctgaaattgaagttcgtccagtgcttacccaagtcgatgatgttttgtctgaaattaatattcgtaagaacttaaatgagcgtgtgttggtaacgactttaaccaagcgtatggcggaagatttaacttcttatttaaaagaatatggcgttaaggttgcttatctgcactcggatattgatacagttgaacgtgtcaaaattattcatgaattacgtacaggcgtatttgatgtactagtgggtattaacttgctgcgagaaggcttagatatgccggaagtttctttagttgctattttagatgcagataaagaaggtttcttacgttctgagcgttcgcttattcagacgattggtcgtgctgcgcgaaatgtgaaaggtaaagcaattttatatgctgatacaatcactgattctatgcgaaaggcaattgatgagacagagcgtcgacgtgcaaaacaaatcgagtttaatgagcagcatggtattacgccacgtagtgcagttcgtcaggctgtgaaagaaattgatacgggtgaagtactttctgatgatcagattgatgagaaagtactagagcaggcgcaagcacttagcgcagatgaacgacatattctttctgaccctaaattgtttagtaagcacattactaagctagagaaagaaatgttaaaggcgtcgaaggatttacaattcgagcaagcggcgcgtattcgtgatgaaattgttcgtttaaaagcgcaaatgttgcaataaatggatacataacactacatgatttgtttaaaaaacaagctactgtagatatttaagttattttgtattcacaacaaagagttgagggcaacaatggcatttcgaaataatgttccgcaagccagttggcgcttggcaaaaattgcattgggcggtattgttctgactggcttagctgtcggaacatatgcctatgcccagcagaagcctctacctaccgtcgataaggttgaattagaccgttatttaggtgtgtggtatgaagtcgcgcgtaaacctgcttttttccaaaaaaaatgtgcttacaatgtatctgcaacctataccttaaatgaaaatggaaacatagttgtagataaccgctgctacgataatcaaaagcaattacagcaatctatcggtgaggcttttgtagtcaatccgccgtataacacgaaattaaaggtaagctttttaccagaggctgtaagatggattccgataattcgtggagactactggattttaaagctcgatgaagattaccaaacagttttggtaggcgaaccttcccgaaaatatctttgggttttatctagaacgccacatccacacaaagaagtggttgatgaatatctaaattatgcaaaaacattaggatttgatattcgagatattattcataccgagcataaagaataaatatatactgcttaagaaaaaaccatgttttcgcatggttttttcttttttatagtggataaatcaagtattgtatcgctttatttttcttaaagtataaagaggttagtgatgttaaagggcgtgattttgtctgtcatggcatcattaacttttggtgttctttatttttatactcaattactcggccagcttgatagtgaacagactttcggatggcgtattattgcgactttgccatttttaactttatttatgtggtggagtggtgatttaagccatattaaaaatatatatcaacgtattttagcgaaaccttctttacttctattactcattacaacatccgttttgacttcggtgcagttatggctgtttttatgggggcctatgcatggacgtggtttgcaagtttctttgggatatttcctgttaccacttgttttggttttagcgggtagtgtcttatatggagagaaaatatcgaaatttcagtgggtcgctattgtccttgcaattattggcgtagggcatgagatttttcgactaggaagtattgcttgggaaactgctttagtggctataggttattccgcttatttcttgttacgtaagaaaattaaaacggataatttagggggcttttggtgggaccttctgattattatgccagttgcaatctatctgacacatacagggttattgccatatagtaagttcctcgatcagccgacactcgggttggttattgcgggtttaggtgtgcttagtgctataggcttgggatgttatatattggcaagccgttatttacctttggttgtgtttggtttgcttggatatcttgaaccggtgttacttgctttagcatctttagtgctgggggaaagcattggtaaagaagaatggtttacttatcttccaatttggtgtgccgttttcgtattggttttagaaggggcttttcatctttaccaacagcagcaaaaagccaaaaatttgcaattaaatatcgaaaaatatcaaaaaagattaaaaaatgatgctcacgattagagcatcaaaatctaaaaagtaagaaaaagcaaaaatttagcggctttaaacaataagataataaaaaataattataggtattttatgaatttatgatgaattttgggaaaatctagccactaacgtcagcttttgattcattcttgccaataattccattacaattacggggttttaaaaatcacgcctagatataattaattagaggacgtatctgtgagcaaagacactatcatcgccctgcacgctgaacaccaaggccgttggaaaaaccgtgaagaaatcgcggaacgtatgattgcattaatcggtcaattataccgtgaaaaaaatattgtcgtatctgtttacggtcgctctttaattaaccgttctgttatccaaattttgaaaactcaccgtcgtacacgtgttgtagatgttgagctttctgtagtaaatactttcccaattttagaagctttagcaaaagttgaaaatatcggttctgcagaagttgatatcggtaaacttgcagttgaatataaagaaaaaggcggtgatgttgacgcttttgttgctcaagctgttgagtcaattaaaggtagcgcaacttctgaacaacctaaagatgtagttctttacggttttggtcgtattggccgtatcttggctcgtttaatcattagccaatcaggtttaggtcgtggtttaagccttaaagcgattgttgttcgtaagtcttctgacggtgacttggctaaacgtgcttctttacttcgtcgtgattctattcacggtacttttgcaggtacaatttctgttgatgaagaaaacgaagcaattatcgctaacggtaacttcattaaagtgatctatgcgtctagcccaagcgaagtagactatactcaatacggtattgaaaacgcgcttttaatcgacaacactggtaaatggcgtgatgctgaaggcctaagccaacacttgaaatgcccaggtgttgcacgtgttgtattaactgcaccaagtaaaggcgaaatgaaaaacgttgtatttggtgtaaacaactctgacattttagatgaagacaaaatcatctctgctgcaagttgtacaacaaatgcgatcactccaattcttaaagtattggatgacaaatataaagttcttaatggtcacgttgagacagttcactcatttacaaatgaccagaacttgatcgataactaccataaagctgatcgccgtggtcgtgctgctacattgaacatggttattactgaaactggtgctgctaaagctgttgctaaagcattgcctgcattaaaaggtaagttaactggtaactctgtacgtgttccaacaccaaacgtatctcttgcgattttaaacttaacgctcgataaagaagttgatcgtgaagaagtgaacgaatacattcgtcaaatttcaatcaactctaaccttcaaggtcaaattggttataccaactctacagaagtggtatcaagcgactttatcggttctcgtactgctggtgtatatgatgctcaagcaacgattacttctggtaaccgcttaactgcatatgtttggtacgataacgaagtaggttatagctgccaagtattacgtattgctgagcaaatgtgtggcgtaagctataaaaaaatccctgcagaaactaacgcttaatctgctttaacgttagataaaagaatgtgacaaaaaaacccagtttagactgggtttttttacaaccgtacaaaatatatgctgattattttttagaaatcaatgagaatacggtttaaggaacaaaaagaaatagtaagggattggaattgcagcagtttaaaagattattgatcgtcttcttttttattatcatcgcgaatatatgtggtgtacttatcgccatttgggtgtttaaacattttaatatttatattcctttgaaaaaccaagcagtagcgatcgatttacaagaaccattacaggtacaagttaaagtaaaagatgctttaaatgtcgatgtaaaagggcgagtgaatgctaatattcctattaatgagaagttaaatattcctttgacgcagactttaacaccacgtgtctatttcgataatatggtgccgattagtacggttattccagttaaagaaactttaaaagttgaccaaagtttgccaattgacacgaaagttcaggtgagagtacttggtaaagatattactttgccattaaaaggtaatattcctttacagttggatgtacctattgatatacaagttccactcgatcaaaaagttcatttgaagtttgatgcgccagtaaaaacggtcttaaaagaaaatcttcatattccattaaatgctcaattaaaaacaaatattccaattcagggaagtttgaatgtccctgtgaaaacagctttaaatgcgtcggtagatgtaaaaaataccttgccagttaaaatcgagcatggtgagttaaaaataccactatcgagcatgagcctgaatcgcgttaaatctggcgaagatcactcttcacctgttcagaaccagacaaaataggtgaatggcttatgtttggctcattaaaaagtatattaatcagtttctttctgattatgatactcacggcaatcttattttggttctatttaaacatacaggcttcagttgtagtttcagcacatgagtcggatattcgtctaccagaatcattagaaactaaaatacatgttggtaataatttgcaggtccaatcgataggtaaattagacacatctattgatattgaccgtcagatttcagttccattaaaaggaagatacttggctgatttagagtttgaagtcgagactccaattacggtaagtgttgattatgcgacaacattaaaagtcgatcaggtgatgcctttagaaacaaccactgatttaatttacaaaaataagttattaccaaggtttccattaaaattaaatatcccgattaaacttgatattccatttcagttaaaacgtagttataccattccggttaaaattgcttttaatggtccggtttattttgagtttgacgaatctataaatttgccaattaaacatcagtttaatccaagtttgaacgttaacgatgcaatggaaatggggaatatttcaagctttaatgccattatgtataactctgttcagcacactaaagctaatttggacatgaagatggatttacctttacgtaatgtccatccttaggtaattaatcaataaaaatagatcatggcttgctgtaggtttatatcctgataaaaagaaataaaataagcagcaggaaagtagaattctctcgattttctattcgagaattttctgaaaatatggcagaataggcggttttagagtttttagaggattggcaaatgcgctttgttgatgaagcagtcattaccgtagaggctggcgacggtggcaatggcgtagccagttttcgccgtgaaaaatttgtaccatttggtggcccagatggtggtgatggcggacgtggtggaagtatctatattcaagcagatgatgatacaagtaccctagtcgattaccgttacacccgtaaattccgcgctgagcgtggtaaaaacggtgcaggtgctaactgtaccggacgtggtggtgaagatgtggttttaaaagtacccgttggtacaacaattgttgatacagattcaggcgatattattggcgatctggtagaagacggccaaagagtcatggttgcaagcggtggtgaaggtggtttaggaaatactcactttaaatcatcaaccaaccgtgctccacgtaaatgtacgacaggtacaaaaggtgagttccgtgaaattcgccttgagttgaaagtattagcagatgttggcttattaggtatgccaaatgctggtaaatcaacatttattcgtgcagtaagtgccgcgaaaccaaaagtagcagattatccatttaccactatggttcctaacctaggtgtagtagatgctgaccgtcaccgctcgtttgtgatggcagatattccgggacttattgagggtgcagcagaaggtgcaggtttaggtattcgtttccttaagcatttagcacgtacacgtattcttttgcacattattgatgtacaaccaattgatggttcagatccggcccataatgctaaagcaattatgaatgaacttgccaagttttctcctactttggcgaagttaccaattgtattagtacttaataaacttgatcagattgctgaagaaagccgtgaagaatggtgtcagcatattctagatgagttgcaatggacaggtcctgtctttaagacctcgggtttactcgaagaaggaaccaaagaagttgtttattacctcatggatcagattgaacaacaacgtgaacgtgaagttgaagatcctgagtacgcagcagaagtaagagcattccgtgaacagcttgaagctgaaacacgtgaacagaccattgcagcgaaggaagcatatcgtgctatgcgtaaggcacaacgccttgaaagcatgatggacgatgatgatgacttcgatgacgatgaagacgatggtgatgtagaaagcatctacgttcgtgactaaaaaaccgaggaaaacatgatagaagtggtcgatgggcaacgtaagctcagtgagtgtaaacgaatcgttgttaaaatcggatcatctttactcacggcaaatgggcagggtctagatctggacgctatttcgcattgggcgaaacagattgcagatttacacaatgctggacacgaaattattttagtgtcttcaggagctgtggcagaaggtatggttcgtatgaagcttgcgagtcgacccaccgatctacccagtcttcaagcatgcgccgcaattgggcagatgggcctaattcatacttggtctagtgtgcttgaaaatcatagtatccgaactgctcaggtgttgttaacacatgatgatttggcagaccgccgtcgttacttaaattcatgtgatgcattgcagaacttgattgattggcgtgttattccggtcattaatgaaaacgatactgtatctaccgatgagattcgttttggtgataacgatacactagcagctatggttgctggtcaagtacatgctgatttattaattattttaacagatcagcaaggtatgtttgattcagacccacgtcataatcctgatgcaaagttattatcaactgtgcgtgccatggatgatgttttatttgaaatggctggtggtggcggtgtgcttggacgaggtggcatggtcactaaagttcgtgctgcacgtttagctgccaagtcaggttgcccgacattgattgctagtggtgaaagcgacaatgtgttgtcacgagtgatggctggtgagatgctgggtacattgtttacgactgataaagaccgtatgacagcgcatcagcaatggcttgctgcacatttacaaacagcgggtcgtcttgtaattgatgatggcgcagttgaagcgattaaattgaaacatcgcagtttattgcctgttggggtaaaaactgttgaaggacattttgatcgtggtgatgtggttgaatgtgtcgataaacaaggtaaacgtgttgcggttgggcgagtgaattttagctctcgttctgctgaaattattaaaggtctttcttcagacaaagtttatcaagtacttggtgaagcccgttcattagaaatgattcatcgcgatcatatggcaatttactaagttgttctaaattaaaaaagctcgcatcatgcgagctttttttgtggggttaatgagggcaagattcgatcttcaccgaccataaaaggatgtgtagcaagactaagcatgtctaaatcttctgagctatttccatacgcatagattcgctgataatgttttagagaatattgctcatgtattcttaacttcttttgctcactactacaatccggagttgagtagtaacctgtcatcatgccatttttaatttgagtctctgtacaaattaattcgatatctagtaatttgcaaagtggagcaagatagatatcaatagaggcagaaactaataccacctgatcacctaatagctggtgttgctgtaattgtgcaaaaatttcaggtgaaagtgcagagacgagttcttgtgcgtattcttcacctagtctttgcaattcaattgcaggagtatctctgaacatgctacgaaatagcttggcacgcatagcatgggctggataaaagttaagataataggcttgaatccatggcaggattttcaagccttgcttcacaatatgacgtttagacaacgcataaaagataaaccctgtaaaactgtctttactgcacaaggttccatcaaaatcgaacagggcgagattttttatagtcttattcgtttcgctcgttgcatacatgtttcatatcgtccgtttacgcgggttgcataccagttagtattatagtcacgacttagtttaggcccagaaatcaccacttgcggcataattgcatagagcggctctttgccagtttttgatttataaagtttagtcagcgcaatataagtttgagtactctcaaactttttctctttttctaattttaaatcatcacgaatctgtcttggtgtaactaaaacattattactagcaaatacggtaattagttctttttctgactcgctttgagttgcgcgtggatcaccatcttttgtgtaaaggagtagatcgccatcaagacttatatccttgtcggtgagttcttttagcattttttgaaaagctgcattacgactagagtacataccagagttgtaatctgcaaaacgataaatggctttatcataatctgccggataaaccattaaacggtgaattccataataaaggccgccatactcggtatataagtcatcacgtagtgcagcagtattcatactcgagcgtttgtttgctttggcataattaatatgaacttgcattgaacccagtgtagtgatcggattcattttttcgccaatatcttgtccaactaatttagctgcgccagttaaagcactcacgtgatagtgtttggccataaaatcgaaaatttctcggtaaagtaaatcaaggtctttctcggttttaactttacgcatctgactcatatagttattgtcaggagagggttgggttcttagtacttcttcaaagtaacctgcaattgttccaccaatggttttgccaagcttatcttcaaatttttcatttaaacgtgtactgacttcctcaaccgctttttgtcctaatcctggcacttgaggattggcgacaaaattggattcctgatcaacgaccgccacaatactacagacattttgtttggttttaggaatgtctaagtctttcataatgtcatcaatatctttagcccatgactcacggtcatacacacgagatgggatgagacgtttgatttgctggctttctaattcaggctcatcattatttgaccaccaggctttatctccacaagcagctaaactcatgcatacggcaaccataccgaatgatttaaataaaaaacgggaagacaacggtttgttcatggagaggaggacacctgcataaaaagatgagctgatcaagcggatgaagtatactatgccgatcatcaattgtatgaatatatatgtatattggtccctatcaactgtcaaataatttaattgttgcccctatggccggtggggtagatattttattaagtatttttattattaataacttataaaactttgagtggtgcaaggtgcaaatacggtgcaaccactcacataattaatcaataacttagcgttttagctatgcattgcgcgccagtcggctctagcttcttcttgtttgctcttcagccataatgctacatcatttaaatgtgcacaccaaggtgaatatttaccatccggcttaaaaactggaaatggtaaatcacatttatttgcacgtttgtttgcctgtggcggcgaaagatgtggcaaataatccggcaatagttcttcaagtgttaccactggtttgcggtatttcatctgaagcaataaaagagtatcgaaagggtcatcaattttttgtgcagctgccatttaattcgcctccttctttctgcgggctaatactttattcatcgtgccccggttgagcttgagcattgcagcagctttatttttactaccgcgtgatttaatcaaagctttttcaataatgactaaaaatacatggtcaagaatttcacgataacttgtgccggtttccagcgctttgtccaattcttcttcagaaataattactcctttcaatttaaatcacctcagtagaacttaatcgaacgcccatcaggatacggccgcgcatatcccaagttatgttatttaatccaaatatctcttgtaacaagtcggctaactggtcactatccagaaataattccttctctataatttgtttctttttcaccaaactgcggaaagtatttataagttggggctttgggttcgcatcattgctagtcattgcaaaacattcatttttttgtggtaattcttcatttttgagtggcaaatcttcgatttttagcggtaaatcttcgatttttagcggtaaatcttcgtttgcaactggtaaagactcctcatctactttgtgagattcgtaaaaatcagcaccagcttttgcaacaaatttaaccattgctttcctggagagtgaaagtgcttccgctaatagttcttcctttgtagcaccagagatttccatcatttgtttaagacctaaacgttcatgatgaataattactgcagtaattcttcgtttaagacttattaaagatcggatctcttcgtcattcatttgactgtaatctttctcttgtaaagaaggttgtggactaactggagaaacttctactggattaaaactatttggcttagtattcacttttaatacttctattcgtggagttgtgttttgtaaagctgattgcataccgactaacgtgtatgtatcaccacatttttcaacttctaaattatctagcacttgcttcacagtttttgcactcaacttgcagatagtcattagctgagaaacagttaacccaaaagcatcattttttaatgcttgcgctaccttcgacttatattcttcgaaggtttttatttcagtaattcttttcatttccgctgcactattcatattctttcactccgaaaacacgagctcattgctaagacttcaagtgttcttcaaactctttaccaagagtctgagctaacgaattgccgactaactctctagtgaccattccatattgttttttgaacctaaaattaaagccgcggccatcttccatatctcgaacctggtagcccaaatgggctaaccagattttgaaggctaagaggtttttgcgtttcacgacctttcgcatcactttctccagctaccttctttcagcaaaacgttatagaggcactgatcaatttcagaagcatttacgttatcgaagtgatggttcatgaattcgccaataactattaatgttctagtcatcgatgagtatctaaatttcatggcagatcctcatcgatcaaatagatagaagagctagtattaggcttttcaagttcaagttttcgagctgttacggcttgcatcatcttcggttgagcaagcggatctaaactgtgaatatcaatttcatatgcatctaaagtagctaagtcaggggcattttggattttcacaagcaatgatggttcattagcttgcttctcttttttaagctcctcgaggcgtttatgcatatattgcaacaatggtgcgcgctgctcagctgaccatgaatttgtgtatttagttacagcattaacttctgttactgtctttgattcgtctacgcgcttttttaattcagcaagttttttctgatatttaccttcttcctcttcaatgtactttttgccattgttttgagaagcgtctggaacatttacatagacatcaactttttcaaatgatttagctttaatgtttaggcgtgtatttaattctgcattttcaacttctgttaaaacgccgttagaatttatacgagcacgaataaaatctaagtcttctttactcttagaattagaaatctcatcaataaaggcttcacataaaactgataattccggatcttgagttttcgcttcagctaaattaagtaagtcatgtttttcatcctcagccttagatttgatttcggctaattcagcaagcttcgtatttttagcatcttcaattgctttaagctggtcaggggtgaaagagtgtttttcaaggccaaagcaaagcgaatcaatttcacactctgttttgctggagctaataccgtcaagaataatgtccttttcggtttccaataattgtggatctgctgacacttcttttgttttctttttgccttttgattttaccgactttgtttctgtagaaagatcctcatcttcgtttgcatcattaaaaatcggatcgcaagtagtaagagtaatttcttgattgattccaacaaatgcttgaaagccttttaaaaacaactgggcattttcaaaatctctctgtactacaccattatttacaagagtaactaggtaagtattttttgaactgaaatcgccagcaatgattgttgatttagaaaaatcaacccaaaagactttttgctcatcaactaactcatctaaagtacaaggctttgtaaaggtgaaaccagcaagctcaattttttcaatatcgatgcagaactgatattcagggtttccaaacactgtcgcagggaactcatttagctctgcaaattcgccctcaatatggcgacaaagtaaatttttaccgctttgcaaagctgcaaaagcttcaacattatttaaaatattcatggttttatccttttattaatgccttacgtaggtatggatctaagtcatcttgctttaataaccaggtgacgtaatcagcaggtaagtctttaatgtccatacctttatgcttgccgaaagtaatttttttgggatgcgtgcttgctctgaaaacaagaacagcgattgcatatctttgatgcctaaagctttgcaaatttgcttgagcaatactgcagttaacaaaacatcctgcttcgcgttatgagcattacgaatagattctcgggcttttactgagccatttgacagcatgtaaatgagtgccgaaagattatgagctgcatctggccagacaaggcgagacaaggctaacgtgcaaattgattttgcatttacggacttgtcagcaagcttgatagctctcaggtcataatcaacattgtggccaatgatgtattgaacatccttaggcaagcggaatgtttcatagctaggcttgtctgctatatctgtttctagaatgtgatgtaccgccatggccccgaaactgatcggctcagggcatgagaagtactcatcaaaacaagcatctttatcaacaaacaattcaccgctatcaagaaagctaaccggtacatgagcgatctcaattggaaacttctcgaaatctgaggtttcagtatctaaaattaatgcgctcatgctttaatttcctgtttcgccagtttgtcaatttctgctttggccagttctattttttcagcttgaatatctgccaaggtgtcgatacctagaaattcacagacatacttaacgtctagaccgcgctcatcaataaacgcctgcagctggtcgcgttgcttatttgagatacaaccagttttaggtgcgtttggtggattttgggcttgggtggtgttgccacgttgttgttgagcctgctgtttttgttgctgagcagtaccattagattgaaccgcttcttgttgtttctgactcaaactttctaaatgctgttgaatcaccaaatacttttcattgcatgcagcaaaaagaatttcatcaaactcaggaagttgattgcgaataccatcaaagaaataagatgcctgagttaaaggcgtgtctaatggcaaatctttgatttgtttaagcgccttatcacagtcagcttttgtggccacataaccgttatttgattggttttggtatttctgagtattgtcgcgttgacgctcgtttttaatattgttattcgtgtgtgtatctaggtcattctgcgaatcatcaatcattaacaaattgccaagagcatatttttttgcatagctctgataagaagcatattgttgagttttagagacctttttattgctatttaggtcacgatcaaaatcatatttagcttcaccaggaacatcacaacgaatatatttctggtctttgaataccatgtatgcataaatttcaaaaccatcagcggtatcaaattttctagtaataacagtacatttgtacttcacaagaagtggctttaatgcttcttgaatatcctcagcagagcgatatttatagccaccaccaaattcatttgtatgagactttggagccttaagctcattaacaactttaataaaagttggatgatgaaaaacttgttcaagaccaggtaagtcaagaggatttacagttgtagcattacctaatacatcgggattaattgcagcattcattttgagtacctcagttatccgttataacgcgcatttttatatgcgattttttggtttgcgctgtatggcgtacgcttaaagcagtcctttgaaaaaattgcttcacgttcttttttgcgctgttctttaacttcctgttcaagattgcgaaggatccatggcctttgcttaagtaggccttcggttacaggtgtgctgccgttttcaccttcaatacgaatgtcatcaagttttaagttggtagagaaaacttgtggacctaaacgaacgtgataacgaccattgtcatcgcgagtaataaattcgcggaaaggggtggtatagcgttttttcatgattagccaccaaacatccaaactactaagtttgagataacgatccaaagcacgatcgaaagggcaataaacttaataaagtcaattgcattggctttaatggttgctaaacgagaagggcgctgttcttcagcggtagggtgctgaaataatcgggcagtcgtttgactctgaatagtgttttgtttcatacttgtctcgcattttgcaaagcacatcgagaggtagaaggttcggtgtgctttttattgtcttggtgaaatttagtttagtaaaaaactaaataggacgcaacaataaatttagtataaatctaaaaataatttattcttatactaaacgctgtttagtgcggacaaaataaaacccacaaaaagtgggttcataagttgatctttataagtttttttaaggcttaactagcgaaagttccaatctacctaaaaaaacgagttcatttaattgttctctggtgatgatttcatcgggatactttttcttatctggattgtcgctttgtaggcgtacagtcttctcgtcaccataactaataaacacacgtttcattcgcaataagctgttatgcataaaaacataaacatcaccgctaatcattgcagaagtatcaactggtgttgtatcaacaaataaaggactatcaggtactacagtaggccacatactgtattcagttgagtaaataatcctaagcctttcaggcttaatatttatacccattaatcttaagaaatttggatcaacttcaaggtaatcagttacgtcttctaggaaattagccacaccatccccacaggaagctctaacatttttatgcacaggaatcttaattgtatttttattttcaaatgatgatttaaattcgactggagatatacgcaagtcatctgactttgggtttacctgaggattaaaaggaacaatattattatgatcagttgagtggtcaacatccataaagccatgttcaagatttagcatcttttcaattcttctggcgacagtattccccagactaaccggtttgccatttttaccaagagtaccctgagtaatttgagtgatataggaggtcggtgtatccactaactccgcaaactctttttgagtactgtatttctcaagcaactttataaggttggctttgcgtattgctgaaatatccatagctgaattaaatagtaaaatactaaaaaaataaatgtgtaaaatactaaacgaagcttgcaataaacttagtaaaatactaaattataagaaggcaacttttaggacccgttttttatgacttctgttcaagaaacagcacgtatcaaaaatcaagtaagcagccttttggcatacatgaaaaaacttggctcagattctgaggttcaggcttttgcagaaaaatgtggaacaaccaaagggaacttattgcaaattgcgtacggcggaagcgtttcacccatcttgtcaaagaaaatctcaaaccaaagtggtggggaggttttactttccgatctaagaccagacattttttctgaaacataagatcaatacctatttttcgtttgaagttggtctagataaaaagtgaaaagccccattgcgaagaaatatgttcagcagatgttgattatctgcatcaacaaaaagcaaaggaaaacctatgcaaaactttaaaacgcattcaaaaccaagcaaaaaattacttgtaccaatgtcaacaagagtaccagttgaggtgcaagaacttgtagatgaattggtgggatcacatgagagagggagagctaaatggataagggaggccataaatttaaaacttgaagttgacttgggtcaatcatcaattgatgagctcaaaaaatcaaagaatacaatgaattcaagtgaatacctgagtgtattcaaaagtattttttctttattccatacaagcaaaaagcccgatgtgcgagatcgagctttaggtgttcattaaccaaggagattaaatcacatgtctactgtatcaaatcagatgaataaagacaaattgttagagttaaagcgccagcaaagttaccagtcctggcatgggccagctttaaaaacgcttgccgatttattgaaagaacgcaaagcgaacttaaagaaacgtaaccatgatgaaaaccaagcagcggtaacacgtgatgagtttatgcaaggcctagttaatgatcatggtgtacacggcataaatctttatcacgcgggtgtaattatctcgagtctgtatagggctaaaaaaattcgatatttgggtagcttcatccaaattattgaaggggatggtggcgcgtgatcccacaagaactaattaatgaaattaggcaaaatgccctttttgttataaatcatagcggtggaaaagatagccaagccatgatgataaaactacttgagtttgttcctaaggagcaaattcttgtagttcatgcaagtcttggttttatggaatggccaggagcattagagcttgcacagagtcaagctgctgcagctggcgttgattttattgtggccaaagcaagtaaaacatttcttgatatggttctgaaacgattttctgaacgccctgaggttccttcatttccttcacctaagtaccgccaatgcaccagtgacttaaaaagagatcctatcaagcgagaggtacgccgttacgcaaaggctaatgatttcaatcgaatagtaaattgtgttggtttgcgtgctgaggaatctagccatcgtgcaaagcaaatgatctttaaacctgcagctgagaatggtaaagcaggtcgcacctggcatgactatcttccgatacattctcttacaaccaatgaggtttttcagaccattaaaaatgctggtcaatcacctcattgggcgtaccaggataatgatcgtttaagttgtatcacttgcattatggcaagcgcgagagacttaattaatggtgcaacaaaaaatcctgaattctatgcattgatgtgtctggtagaacaaattactggatatgcaatgcacgctagtttgcggttccttcctgatctaaccggtatacatcctaattattcacttttaagcgaataccaagatctagtttcaaagttttcaaatacgcgctctaacagaaaacgtatacaaatgctggaggttgcagcatgagtaagtatgtccctaattcattccaagttgcgaacgcttttgtagatgaagcaatgagtaaaatctctgatgcttcagtaaaaatctatttgattattaaccgtaaaacacgtggctgggcaaaagaatgtgatgcgctttcacttacgcaactagaagaactgtcagggaaaagtcatccaacagtcgttagatgtacaaaagagcttgttaaagttggtttagtaagaaaacatgagcaatctgtatatgggaatgtttactcattaatagacaattattttgttggtgagcatgtaaacttcccaaacaagagttcagtacttgttcagtcttttagcttatttaatgggcagctagttaaaatttttaactaccaaaagcctgtgtctaaaaaatcagttaagagcaaaaagagtaaaaatctgtgtttaaattttccacaaaaatctcggttgctagttaaaaattttaactaccttgaaaatactagccagttaaattttttaactactgctagtaaaaattttttacccctactagttaaaatttttaacacacaaaacacactatcaaaaccaacttatcaaaataaaaaaatacatggtttgttttagaaaatttgaagtttgaaatttgttctatcaatccgtcaattgatacggatgagattttcaaggcctcttggtttgagagagagttaaaagcattcaaaggttttaacgaaggtcgcaatcactctgattacgatatggttcgattctttgctgagtggatgcttaaagcacgcgctaaatacgccaagatgaaaacaccggcacctcgccaaaacaattattcaaatggtcagtcagctaaaccagctaatcaaattcctgaagtaattactttcgcatctgaaaaacaactattcgcgttcgcacgccgtttagtaaaccatcctgatttcaaagatacattttgccataccggtgaatcatggatggatgctggaaagcgtatggctcaaaagttggtagatcctcaggaacaaaaaccatttattccgtatttgatcgagatgggttttaaaaactcatccaaggagacggctgcatgattactctaaataaaactaccggcattcaaaaattaaaagagattcttcaagaatttgattcttgtatgtacatcgaacgtgacaatttttttgacaagcattatgacctagttaaaagcgaaagtgatattgagcaaattcgtattgcagtcaaagcagctgaattaaagaggggtacacgtgtcaaagtaaatttcacacatgtaccagacaagggtcaaaacaaaattcattttgttggcaatggtactgtcgatctgtttgaagataaccgggtatttggtcgtttagatgatggccgacctttttgctgtttagtctcagatatagaaattttggtttcagaaaaattagaaaaggaagatggctacgaagaatctaaggcagtcaataaagtctatttttttctttgtttggtcttgggctgtgcagtagttaaggggtgtggcctatgaaaaaggttatcagttttagtggtggacgtacttcagggtatgcagtcaatctctttaaaaatgatcctgatgcttattttatttttatggatactggcgcagagcatccagctacttaccaatttattaaagatattgttaaacattggaaaataaatcttgtatgtcttcgtgtagtcgttaatccacaaatgaaaaagggtgtgggctacaaaattataccccttgatgagctcaaacaagacttggaaccttggagagatatgctcaaaaagtatggaagtccttattacgatatgccgttttgtacagctcgtatgaaaactgaaccttttgaaaaatattgcaatgatgtgtttgggaaaaacaactatgaacgatggattggtattagatctgatgagccaaaacggttgccaattgaggttttagaaaagcttggtttacctattcataaagacgcaaagaagcagaaagccgggtttagatatttagctgaaattagtgatttcactaaagaagatgttttggactggtgggaacaacaaccttttgatttagcaattacagaacatctaggtaattgtgttttttgtattaaaaaacacttaaacaaagttgcactagctgccaaagacgaacctgaacaagcagtgaaatggatagcggttactgaaggcgaaaacgtcagatctgaaggtagaaaatacaaccatcatcggatgtatcgaacgcggttacatttgagcgatgttatagaggctttcaaaaatcatgacagagatgagctttacaacgctcttagaagtagcaagcgctatgaaacaggctcttgtactgaatcatgcgaagccattatttgagggaatggtggatgaagttaactaaacaacaacgggcagagttaaaacaaaaatttggcggccattgtgcgtattgcggtgaaatgctcggtgataaatggcatgcggatcatatcgaagctgtgaaacgagatttaattcatgttggcggtggcaagttgattactggagaaatgactagaccgcaaaacgacactttggaaaacatgaatccagcgtgtgttccttgtaatacaaacaagtcgtctatgcccttggaagggtggcggaggatgctcacacattatcgtgatgttcagttgttacgagatagcacacatgctcgtcatttactacgttttgggctgattgaaatcaaatctgagcctgtgaagtttttctttgagagttataaagagggccagtcatgaataaaccattagaaacttttgatatagacgcagcaaaggctcgctacgaaaaattacgaggccgatataaccggagtgggctatctaatactgattacaacgagctacttcaattagaaaaggcaatcgagcaagcaaagaaagttaatgaaggagcgccgattgatgagcgaaaataagttatcaccaagacagttggtactcattcgacgggcagctgaagatgctatacatgcttgcaatagacattacggcccatttgttgactatgttgctcacccattaaatatcatttcattggttgatatggcgcaagaaagcctacaccagcaagagctaataaaacaaaaggatacagtaataaaatttgctaacagtatggcgaatttagatcaacagaagttcaaggaattacaagaacggataaatcttgccctgcaacaaatacaaggcaatttgcaatatgttgagcaggataagagagaaaactttgaatttctgcaaatggctatgattcgagcatttaaagaattagagaaagtgctcaatggtggtgagcctaaatgacatcgatgagtttagcggattatcactctaaatttccaaacggccataaagctaaaaagggccgtaataaatttaatgcttcaaaagtcacattagatgggatgactttcgacagcaaaaaagaactcaagcgatatatcgaacttaaagccatgcagcaacgcggtgaaatctttggattagagcaccatgcaaaatttgaattggctcctaaaactaagatagagggggaaaagagaacaaagccggcacttagatattttgctgattttacttactacctcatcaatggcgagtacatcgttgaggacgttaagtctattgctactaggaaattacctagttatcgcaataagaaacatttaatgaaaactgtacacggtattgatattagagaggtttgagaaaagtttatgagcgacattgaaacggtaggctggacggcagataagcggtttttcatattaaaaattaatatggaaacgagtttgactacagatgattgtgaggttttagcaggattgtttgttgaaaaatatagtctggaattttcaggctgccagtttcatggaaagctcgcagtgatatgtggagataaagtttacgtgaatccttgggcgcttgatcaagaagcaagtgtagatgaaccagttgaggaactgtcatttagtgagttccaaacgttattgaataattaaggtatagggggtgcttatcttatgactacagttgtaatggattggtcaagattttctatttttgaatggttcgtttgtggcttaaacccgaaatcaccttcatttggtgctgcgaacgttagatgtactgatgggaggtcaatagactttcatgacaaattaggggtggtagctgcaatgggtgatcaactaacaaaatcagttgcaatggtcattatgaccgaaggaaagtcccaacgggattatgaatatgttcgcaatcatttagctaaaataatgattgatggagcagagaaagataaaagaagagagcctaaggggatagctatttaccacttagcttggttaattgctcgtattgttattgattttgctttagatcccgaattagaaaacgcacataaggatcctggtcgacttgtttatgccggcattagaagtttccaaatggatccggaggtataccgcaaaacatggaaacgatacgaagatatgatgattgccgcgcttaatgaagaaattttaaaagctactgtaatcgctgaacgctataagaaagaaaccttaaatgaagcaagaaattagtttccacttttgtgctatttgaggtatagttttattaaattggtcgaagtataaattagaccaaattgcatttaaaagctcatctaaacaggtgggcttttttatggcctcattaaaagctcgggtccttaaggataccgagtttttttatttttagtcttaattctaggaataaacagcatgactatgacaaacgctgaattagagaatgaaatcaaagctctaaaaactcaaattacatctcttcaaggaactgttagcaataaagctgatgctacagcagtaagtgctttgaatgcccgagttactagtgtggaaggtgtaaatacaagccaaggtaattcaatcactactttgaataatggcttaaatgcagtttcgacacgtgttactgcattagaaaataaataaataaaaaactcggtcccaaatggagaccgagtttttttatatcgagtaaaactggggacgaagtactgcggtaacagcacttcgacctcctgacagatgtagcctgccaaaagccaagcccagctatcgtgcacacgatttgcgaaggctatcaaaaatataagcttttgcacaggaaaatttttatgaaatcaaaaccaataattccatggcaaggtggtaaaacccgtttggctaaggatttgttgtgtaagttcccagaacattcatgttatgtggaattattttgtggtggagcagcattattcttcttaagagaaggaccagcaagaactgaagtaataaatgatctgaatggcgagttggtaaatctgtaccgggtagtgcagaaccatttagaagaatttgtgcgtcaattcaaatggtgcatttcaagtcgccagatttttgaatgggaaaaactaaaagtaccagacacactaacggatattcagcgagctgcaagattttattaccttcagcaacatgcgtttggtggtaaggtttctgggcagacatttggatatgcaacaacaggccgctctttaaatctcttgcggatagaggaaagtttaagtgcagcacatttgcgtttgaatggagtctatattgaaaacctgtcctgggatatttgctttgataagtatgaccgggaacatacatttttttatgctgatccgccgtatctagatacagcaggttatggagtagattttccattagatcagtatgaacttctttctgaaaagatgaagacttgcaaagggaaggtaatgctatcaattaatgatcatgaaaagattcgtgaaatctttaaaggttttaattttgcatgtacttcaattaattattctgttggtcgtgatttggctgctaagagtaagaaaagtaatgaactgataattatgaattattgatctcataatttggtttaaaagtttgccgtaataattgcggcgcaaacggcccctctaaaaaatggttattggaggggctttttctttttggagaaataaaagtgcgtatgagccgattattactagccacaactgctggattaatggccttaaatacaaaactaagtgttttaagcgccttggttgcatcatgtggacacgcatcacctttgagctgtaaggcaaatacagtaaagagtaaacctaacaaactaagtcaaaagaaaaaacgccttattgctcgtcgtcttaataaacataagtgagctggataaatggacaaaaacgaagctaaaaaaaatctggataaatattcacaggaacttgagcgttatcaaaatctctccagatcgggtcttagccgtgatgaaatgttagttatcgatagaataattcttagattaaaaaagcaagttaataatttacggacggccttatatggacagtaacgattatttttggcttacaagaaaaaaagaaccaagaacaaaaccaaaaagccgcccattacccaaagcaactcaaaaatacctagaagctgaagaagaatttactcatgcattagatgtgcttgaaatcaaatatgaaaagaaatttaagtttaaatctacaaaacattggcgatttgattttcatttaattgaacatcgtattctggtcgaaattgcgggtggtccatggtcaggtggtcgaaaaggtaagctcaaagataaagcttggagtatggatcgatacgatgatgctgaagcaatgggatatacggttgttcggttagaggcagcaccaagttttaaaattaatgaatctggcccgttacagatacaagctcattttgctagtcagtggcttaaaaacttaaagaggcaaatatttaatggatcagatcagaccgtttccaccaactgattttattgatcaagctgaagaagaggaagcaattcgtttaataccggctccagacctaaaaaaatgggttgtggctaattacttaacgattggtgggcctctttataatccagatcatgatcatattgctgagttacttcatgataatgaagagttcttggcatttgcttgggcctcttctgcatataaaagcaagcaggcgatggtgctggggcagtgtgaaaaagtaatgtttaacgtcggtggctggcgtaaagctagacaagagcaacagatgcgtgactggttcggttttgtgccaacatacttaataactgtcgacgcttctttctgtgagcgtgcaaacgatacagagttctgttatttgcttgaacatgagctttaccacattggagtgatgagagacgaggacggagaaattgtttatagcgatagttctggtctgcctaagcactatcttgctggtcatgacgttgaagagtttattggcgtagttaaacggtggggaccaagtaagaatgttaagcgacttattgaggtcgcaaaaaatccgccgtttgtttctgatttagatattgcgagatgctgcgggaactgtgtaatcaattgagccttatggctcttttttttgtcctgtttgctgtacgtagctgtacgaaggggaatttatggcagcactaaaagagcctgtgaaaatatttattgttcaagctcttgcatgccgtgatacccctcaagaagtggttgaacaggtcaagcaagagtttggagttgatattagtcgtagccaatgcgaatgctatgacccaacaaaatattcgggcagaaacttaagcaagaagtttgttgagctttttgaattaaccagagagaagtttgataaaggcttaattgatattcctattgctaataagtactaccgactgaagcaataccaaagacagcttgagaagactagaaacgtcaaaacagccttaaaaattcttgagcaagccgctaaagacattggtggtcaatttactaatcgtcaagaaattacaggcaaagacggcggaccagttcaaacagttaattctgaaattccagttccaatggaagattacttaaaagcgcggagggaagtcttagatgagtactgatgcggctcgggataaagccatccagatcgaggcgcaagaagatttatatttctttacaaggtacatgtttaaggagcgccgaggctacaaatggatgcaaaattggcaccacttagaaatctgcgaagcattaatgaaagtttatcgcggtgagactaagcggttaattattaacgtaccacctcgatattcaaaaactgaaattgctgtaattaattttatggcttggtgttttggaaagaaacctgactgtgagtttattcatatcagttactcggcaatgcttgccgcaaataatgcatttcagactcgtaatatggttcaagaaaaggcttataaaaaggtctttcctgatcttaaattacgtgaggatagtaaagctaaggatttctggcgcacagatgcaggcggagtctgctatgcgactggtactggcggtaccattacaggttttggtgcaggcaaaatgcgtgaaggctttggtggttgcatcatcattgatgacccgcataaggccgatgaagccaaatcaaaaactatccgtgaaggtgtaattgactggttccaaaatactctcgagtctcgtactaactcaccagaaacgccaattattgtcattatgcagcgtcttcatgaagatgatttggctggatggctgctaggtgatagaaaagacggcgttcctgtagctggtggtaacggtgaagtgtgggagcatctatgtctttcggctattcaagaagacggatctgcattgtggccagcaaaacacaatattcaaaagttgaagcaaatggagcaagctgcgccgtatgtttttgccgggcaatatcgtcaaatgccatcaccgccagcaggtggtttttttaagcctgacaatattgaaattgtggatgctttacctgctgatgtagtgaagcaagtaagggcttgggactttggtgctactgagaatgaaggcgactttacagcaggtgttagagaagctcttggcgcagatggttttacttacattgtcgatgttacaagaggacagcttggtccagacaatgttaataagcgcttaaaacaagtcacagagttagatgggatgggcgtaacggtaaggattcctcaagatcctggtcaagctggtaaatcacaagctagtgcattcgtaaaacttcttgcaggatatgacgtcaaagccaaaccagtttcgggagacaaactcacacgtgcacaaccttttgcggcgcaagttaacgtgggtaacgtgagaatgcttagaggtgattggaataaagactttattgaagagcttcgcaattttccaaatggaacgcatgacgaccaagttgatgctggttcagatgcatttaatgaattgaatggaggttttgaggccttctttgctgatatgggatttgctcgatgagtgacgtaacttttaaacatcctgaatatgttaaaaacttgccatattggcagaagctagatgatgtgtgtgaaggcgaggatgctgtaaaggctaaaggagaaaagtatcttccgaaacccaatgctcatgatcaatcacctgcaaataaaagtgcttatgaggcttatcgtactcgggcagtcttttatgaagtaacggggactacatctaatagtttagttggtgcagcttttgcaaccgatccaagttttaaatttcctccagaactagctcacttagaacgcaatgctaacggcgcgggattaagtgcttatcaattggcacagaacgggatccgacatttattaaagcattatcgttgtgctttatatgttgactatcctgcagttacaccggctcgaaatcttgcggagtttaaacagcaaaaagcctacccgatgattcacttattgaatgccattgatgtgatcaattgggattcaatgatgattgataaccagaaaaagctttgcttggtggtcatccgtgaatttacttcagaacgaggcgctgatggctttagcaaatctgaggtagagcaatacagagtacttcgtttagagcctgataatgaaggaaacttcatctatacagttcaagtttacacaaaaggcgacaagggtacatggaagggcgaagataagaagtatcccactgataataacggggatttctggtcttatattccattcacttttgtgggggctattgataactctgaagagattaaaaagcctccattgctcccattggctaatcttaatttagctcattatagagatagtgcggactttcaagagtccgttttttatatgggccaaccacagttttatgctaagggagttaattgggcttggtatgacgaggctaaaaagcgtggcatttatatcggtgcgaaagttctattacctttacctgaaaacggtgatttggggattgtacaagcagatccaaacacattagcacgggaagctatgaaggataagtgggagcaaatgaaggagcttggtgctcgacttattgaaaaaggttccgcagctaaaaagactgctactgaatctaacagtgatgatgccgtgcagcattccgttctttcactttgtgttgtgaatatgaatgaagctttgtctatggctttacgttgggctgctaaatttgtagtacctaatgttgatgttctgactaaagatgaactgatgttcgaaattagtcaggaatttaacaagcaaggttatttagctgagttggctcgtcaattgtttgaagcagctttacaaggtagatcttcattcaaatcttggtgggaatacaaccaaacaggaatgtttcctaaacaaaaatatgaagaagaaatcctaaatgttgaagctgaacaggatgggactttgaatcaaggagtgaattgatatggcggcaactatcaaagaactcttagaggcactaactcaacaccaagcatatctttttcgcgcttcatcaaaaacagttaatgaattattaggtttatttaatgatgatacaaaagcaatgctttcaaagctgcgtgatctattagaggaacttaatgattcagagaaaattgctttagctggtgggaagtatacaacgtcaaacctcagagagattaaagatttgattgaccaatggtttgctagtgtaaatacaagcttacctgaagctttcaccgtctctgctaccgctttagcggtttatgaagctaattacatagccaagctatacggagcgaaaaataaaactcttagcggtgacaagttctattctgctgctaaaaaggtaccattggctggtggtgccctagttgatgatcttttatcaagaattactgaagctgcccgtcaaaaagttgaatatgcaatcagagatggtattaacactggcaaaactaatagtgagattattcagcgtatccgtggtaccaagaagctaaattatgaagacggattactcaacagcacaaaatcagacattgagcgcactgtaagaacggttcggagccatgtagctaaccaggcatatttaaaaagttttgatcaaattggcttcaaatatgtgcgatttgtgagtgttcttgatggaagaacttcaaaactttgtgcatcccttgatggaagcttttgggaaataaatgacccagcaaagcgcgttcctccattacatccaaattgtcgaagcattctggtaccagttgagaaagacggttctttagctggtcagcgtccttttgtgatggatgagagaagagtgaaagacatccccaaagaagagcgtgatcagttgattgggcaaatggatgcaaacataacatttaaagagttcttcaaaaagacagatgacttctttcaaaaagaatggttgggaccaaagcgttacaaactcttcaaagagggaaaatttgattttgaaaagttcttcgatccggatggacgtctttatacactcgaccaacttcgcatgttggacgaacaattgttcaagaggttgggaatatgaattttactttaagtggtgaggggaaaattcaactatctactcgagcaaaatacagattgcgtagatggcttagaaaacttgaaaagaggtcgaagttatgaagcaaataactatgactcaagcacaatacatcctaagtacaaatcttattgttgtgccttttgtaaggaagttgattccaagatatatggctattttaggatacaacttcaaacagcccacagcacagattccgcattaaacctaattcaaaccatagcaccttcgggtgctttttttatatgaggtcatcatgacaaagcaaccgcaaacacttcaagagctagttcaaaatgttgaatatttcaatgtggaccaagcatcaccagatgcactacctaaacgcattatatgcatcctaaaacttcactctggagtgcaagtaaacggcgagtatttgattcctgaaggttcacctgttggtgattacaatccgtttgcacttacatctgccattgaaaatttaaaaaagctcggatttgaaattattgaaccaccttctgaaccacaagtaatcgaaggtgaggcagttgaggttggccagaatttagatgacccatcacttaaagcggttgaagcaccaaaaattaaaagtctggaatcccatgtaactgttacgggcgcaggggttaatacttatgatgttcgtcatgcaaatctgcattcaattgaagcattgacctcacttttgaaggttacgaagttaaatactgatgtgtcgaatgctgcaaactctaagcttgttgaacttattaatggactctaagtttcaggcgtcttgagcatattttaattttaaccagcacactaaggtgctttttttgtgagaaagaaatgaccaaagaagtaacagagcaagagttagcggaaaagtctgtggcaccccgagtaactaaagcgcaaattgatgcgatgatggaccgcgttacatatacagtggagcagcgccctggaggtacaacatctacttttgtacatgcatttttagatggaaaattttttctagcaacgggttttagcgcatgtgtgaatgcagaaaactttgatgctgaaatgggtgagcgtatagctcgaagcaacgcagaaaagtcagccgaaaataaactttgggaactcgaaggctatcgtttatttgccacaaacttctaagtttttaatcgaaataaagcgtccttaggggcgcttttttaatgtctgccggaagcggatgcggacggtgaatccgggcggatgcccacttgtgtatataggttggatgaccaatgaaacttaaaacagtaacgatcgacggtaaagtttatgcggaagtagacggcgataagccgatctatattcatgatgacggcaaagaaatgccacatgatgcacctcattcggtagcaacaattgcacgcttaaacaatgaagttaaaacacatcgtgaagccaaagaagcagctgaaaaagcattaaaagcttttgaaggaatcgaagaccctgcggcagctaaaaaggccttacaaacaatccaaaatctcgatgataaaaagctggtggatgccggtgaagttgagaaagttaaagctgaagctatcaaagcagttgaagaaaaatatgccccgattgttgagcaacgtgatgctcttgaggcctcattgcataaagagctaatcggcggtggttttgctcgttctaagtacattcaagacaacattgcagtacctgtggatatggtgcaagcgacctttggtcatcacttcaaaatcgaagagggcaaggtggttgcatatgaccagaacggcgaaaagatttattcacgtgtacgcccaggtgaacttgcaaatgttgatgaagctttagagtcattggttggtggataccagcataaagacttaattcttaaaggtggtaaagggactggtggaggtttccaaagcgggggcaaaggtggagcacctactggaatgaaacgcagtgaaatgtctgtttctcagaaagcagattacatcaaagaacatggcaatgatgccttcctaaaactaccgaactaatcattaaatatttggagataagtagttatgactacaacagttaattcagacatgatcatctacaaccaattggctcaaactgcttatttagagcgtttgcaagacaatttgaacgtatttaaccaggcctctaatggtgcaattgtatatcgcaatgagattattgaaggtgatttcaataaagaggcattttacaaagtgggcggtagcatcaagcatcgtgatgtgaattcaaccgccaaagtagtgcctgagaagattgggtctggtgaatctgtaggcgtaaaagtcccatataaatatggtccttatgcttcaaccgaagaggcattcaaacgccgtgcacgcacacctgaagagtttgccatgattcttggttatgatttagcagatgcattagttgcaggacgtttacagtacagtttagcctccttaaaagcagctatttctagcaacccggatatggttgccaaaggcagtattgctgtagatgggcgtaaagcattaacacgtggtatgcgtaagtttggcgataagtttggacgtattagtttatgggtaatgaactcagatacttatttcgatattgtcgatgatgcaatcactaatcaaatttatggcgaatctgaaatcgttatctatggtggtttaccgggtaccttaggtaagccggtattggttacagatgccgtaggtgatgatgatgcatttggtttgcaaatgggtgcagttactgttacagaatcacaagtaccaggcttccgcgcgtatgacatcaatgatgaagaaaacttggcaatcggtatgcgtgctgagggtacatttaacctagatattcttggttatagctgggatacatcaaaaggtgaaaaccctgaccttactttacttggttcaagtgccaactggaaaaaacatgctactagcaacaaaatgacagcaggcacattgcttgatctatctggcacaacaacaactggttaactcataaacatctcactataagagggctattaagccctctttttacatttaagagaaatgcatcatgaagctaatttatacacgtattgctgctgcagctgcgttagaggttggaactattgccaatcctgattattacgaacatccgaatcgaagtgctgaagaagtaattatttacggtgattacccgaaaatccaaaatgattaccaagctctggatattcctgttgaagttcgcaaattggaagagcctgcaaaaacgacattggccactgtaaatgtagcggttggaattactccagagctgcaagaagttattgataaaactaaagctgagtgtgaaaaggttgttgaggaaaacgggcaacttaaacagaaaatcgaaatcttggaacaagctagtggtgatagttcggagttaatttctgaaaactcacgtttaaaagatgctgtactccaagctgacaatgctactaaagcggctgaagaaaaggtagtaagcattcaagcagagtttgatgcttttaaaaatgatgttgctgctatgcaagcgcgtattgctgaattggaagctggaaaagcggcagaaaattcagcaacagaaacggcagctaatgattttgaaaactggtcaaatgatcaattaaaagagtatttggctagtaaaaacattggttacaaaccgtctgcaacaaaagcagaactccttaaattaatcccgaaggaataatgcaatgagctttattactgtagatgacgcaaattcaattttgggcagcgattttgcaccagacagtgataaagctcgtctggtaaagctggctaatgtttggatgaaaaaacggattggttttgtaccagatcctattgatccacttcttaaagacgcggcttgtgaaattatcaaaggaattctggccaaagtaatttataacggcaaagaccagcagttgaaacgtaagaaagttaaagctgattctgttgagtcagaaaaagaatatcaggacggatctgaagcaatctctagctttgaacagatagcaattgattttattgattcacttgaattgaaagatccaaatgcaagttttaatggctttggcataccactttacagggcatgatatgggcttacgtgacgaaattcaggcagatattgctgaagcatttaatgaggatctggcggatgcggtccaaacatttacatgtgacagggttgttagtaccaactggaaccctaaaacaaacacctctgaaaatgtcattgagcattatgaggggcgtggcgttctgtttggctcatacaatcaatatgaaatacaaactctcggagtactggccacagataaaaaggcaactgtgctgcagaatgaagttaccaaagagccgatgattgatgacgaatggagtacggcgcaaggtacatatcgcatcatgcatatcaaacaagatccaatcagtgcaagctggaaatgtcagcttcgaaaagtgtaggggctaaaatggttaataccgaatatgttcaagagtggtacatcacaccttttcagcatgtgcaatacacgcttgctagaaatcagcttcacatggatttgttatttgaagatatggatgaagctgatcaatttttggatatgggagcggatgcacaggttagtactttttctgatggtgcatatgcaatcgtccaaattggtgatacggcggataaagacaaaattcaagtatatggattgcttttacatgaagcggttcacgtttggcaaatagtaaagaagcgaatgggtgaaagtgaaccaagtgttgagtttgaagcatattcaattcaagcgatcgctcaagacctatttgaaatgtacgaagcaagcgaggtgagcaatgggatggaaggggaaaaagccgactagctttagtgttgatgtggtgaaaaatgctgaagaacaagtaaagaaaatcacgatggataccgtgcaatcacttgtagtttcgagtccagttgatacaggtgcttacagagcttctcatatcgtatctattggaactgctgattatggtgttcgtgaaccatcaactaatccagttcaagatgcagcagttcaagcagtcaagtttaagcttggaaatctgatctttattcaaaacaacaaagcctatggtccgcgattagaaaacggttggtctgatcaagcacctcttggtatttacagcactactttcacttacattactcaaaaatatggtggctaagatgccaatgacattagagcaagctagacaagcaatagtcgaccgtatgatggcctttacaggaatttctcaagaaagaatccattatccaaatgcaccaggcttcttagcaccagcaaagggcttatggtgccgcttaaccattaaatggggtccaagtttcattgctgggttagccgatacaccctgtactcgacgtactgggaatatcttgattcaatgctttgcaagaccagacacgggagaccaggcaataaccattctaagtgttgcattactttcacattttgaatatttcaggattgggcatttagaatgctttcaaggtcaaacgatagatgcgggtaaagatgctgactttctgcagtacaatgtgacgattggatttacggtgaattgatatgtcttacatgctgacgctagaagaaattgaaattaaaaaacaagagcttgaacgacacttggcagatgtaatggctaaggagctaagtaaatggcagttgtctaataaattatgtatttctgatgtaaaaattcgcctcgctaatgttaatagcataaatggaccaaatttaaatattgttactggagtaagtgttgatttggatgattgatattaagttttaaagaagttaccgcctgagggcggtttttttacgtccctaattttatagccaccttcgggtggctttttttatgcctaacgtcggagtatatagatatgtcgagtggtgcacgtcagataacacaaatcgcgaaggaaaccactgttggtaccacaccttcacccttcgcacgtacgacctttgaatttactgaaaatggccttgatgcgacagtaacaaaggaagactctaactcaatcacaagtggccgtattgcacgttcatcaatgattaccggtgcagagtatgccggtgaattaaaatgtgaagcgaagtacagttcattagttcaagacttaatggctgcagctgcttttaataactggtcgtcaaatgtattaacttttggtggcacacttcgtcaaacattttctgttttacgtggctttgaagatgttaatgactaccatgttttccgtggatgtcatgtaaacacttttggaattgatattcctgaagctggcttaattacaatgactttcggccttatggctcttggtcgtacaaacttttcttcagcaccggctggaacaattacagcggcagataacaatcctaaaatgtcgaatgtctctgtaggtgacattttaattgacggcgtttctcaagctgggatttcatgcttgaccgcttttacatttaattgggataacactatgcagctacaacgctgtttaggtggtggtattgatgcacgtgcaatcctagaaatgcttgcaacaggtacaggttcatttaccgcagcttggtcacgcaatacatccgatatgtatgaaaagcaattcactaacaaaacgatttcattaaaagttccaatcactgatacagatgggaataaatatgaaatttttattcctaaagctgaaattactgccccattacctagtggtggtaattcagatcttttaaatgcttcattcgaatataaagtcgtagaagtagccccaaccatcactcgtacaccagcagcagttcctgcgtcttaatcaatctgatagcagccttagggctgctttttttggagtttaaaatggctttaaaagtaagcattcagactagtaaaacagttagtaaatggcgtaagtatattgatggtgaagggaatgtattagctgaatttaaagtacgtggtatctcatataaaccatatcaagtggcccttgagcgtgcaaataatcagattgcatcaaaaggttatgatgtaactaaagctagtaaagacgacaagctatatcatgaattgcttcttgaagctgcggcctgccatttaattgaggactggaaaggcgtagtttttgaagaagtaaccgaaaatcaagaactgattgtgtctgaaccagaatattcgcaggaaaatgcaattaagttgttgaatctaggcgatcttggtgtggcaatttggttgtttgtgagacaagaggcggaaaatatccaaaaagaagctgatgcatataaggatgaagtagtgggaaagtcattaacctctacaactggaccaagttcaactcagaagaagaagcgagcgactacaacaagaaacaaacagcaattgcaaaagccttaaatttaaaaatagctgaaaccatccaaaagcctgaatactcatttacagccaatgccattctttcagcatataacgtaatttcccgttcaaggcgttatgagcaaggcattcccttggctttggatattgcagctatatctgcctattgtgatcattatgagatcccagtcgaaagagatatttttaacgactgtatctttgcaatggataatatttttctggatgattctcacaaaaaaatgaagcgtccaacaaaaaaataaccctagaggtatttactaaaaacaactctagggttataattgactcatcaagttaacaaggggacggtgtgaaaagtctggatttaatcaaaatgattgaagcagacggttggtatgaggttagggtttcaggaagtcatcatcacttcaaacacccaaccaaaaagggattagtaacaatccctcatcctaaaaaggatttaccaaacggaactgttaaaagcattttgaagcaagcgggtctaaattgacccgcttcaatcagactcatatagtcctatttcacagtacgattttgtacatgaggtgagtgcaatgttatatccaattgctattgaaagaggtacagacaccgaagcctttggtgtctccgttccagatattccagggtgtttcagcgcaggcgatacattatatgaagctatcgagaatgttaaagaggctatttctggccacttggaaatcctagcagaagatggagaggagattcctttagcatctgatgtcagtaagtttattgaccaagaagattatagaggtatgatctgggcagttactgaagttgatgttagccgttacttaggtaaaccagaaaaaatcaatgttactttaccaagccgattaattcggaagattgatgataatgttggtaaagataaaagatttaaaactcgctctgcttttttggccgctggtgctgaaaagctactacatgcttaaaatagagaggccactcaatcgagtggcttttttatttcccacctgttaaattttacccattaataaagatgggtaatttcatgaaaaagattattttattgggtttagcttcaattcttggcggatgtgcagccacaacggatatgatgaacaatcagtatatgtctgttatacccactactaccgatctaagtggcttttggtctggcaataatggtccatatgcggtgacttactcattcaacaaagacggcactggcttaatgtgttctagttggaatggtaaagattctcttgaaaagttaaaaatacatggtgatgaaatcattttacaatcaggtttaaagcaaacaattaagtccaaaaccgaaaccaagttagaacttaatgttaaatattatggtggtggtagttatcaatacagcccagatcctaagctaatcaatgcctcaccatactgtgagaaagcactaagaaattagtccaaattaaacaaataacccgcgaaagcgggttttttattgcctggagaaaagttaaagatgactcaagaatcacgtctagtcattactattgattcgaaaaatgcggaacgaaacgcaagaaatctaggcaatgaactcgacagcatagaaaagaaaggggattttgcatcaaagtccatggatagtttatctgtagcaacaagagcacttgctggacacatggcaggtcttgttacggttggcgcggccatatccaaaatggatgagtatacaggcttacagaacagacttaagttagtaaccaagaatcaagttgagctaaataaagcaactgaagatacatttagaattgctcaaaaaacttatgcgacatggaattcggttttgcaggtctaccagcgttttagtgacaatgcgaaaacactaaacataaacatggacgaaacggcccgcttaactgaaacagtatcgaaagctgttgcaattagtggagcaagtgctcaagcagctgatgcagcactagttcaatttgggcaagcattggctagtggaacacttagaggtgaagagcttaactctgtgatggagcaaacccctgccttagcaaaagcgatcgcacaagggatgggtattactgtagggcaactacgttcagttgctgctgaagggaagattacatcaaaagaaattgttaaggcccttaaaaatgttcaagatgacgttgatgctctttttgcaaaaacagatatcactatcggtcaatcactcactcttttaaataacgagatcacaaaatttgtcggcgagtcaggaaagggaagcggtgcggctcatgtgcttgctgattcgattcagcttcttgcatcaaatttaaagttgatttctgatggagcactggtgttagggattggacttgtaactaaggcaatcgctactaaaaccgttgcggtatatgccgatgttgcagcaactgccgcaaatgtaaaagcaagcaaagaaaaggttattgcagatgcagctgaagcagccgctgctgtaaaaacagctcaggcgcaaatagcaaattcacaagcaacattgcaggttctagccgctgaaaaagcattagaagttgaaagactaaaagcccaaatgaatgcggtcggtcgcacacaatcaattacgcgtatggccgaattaaagaaaattgaggctcaggtaacgcgagaattagctgctgctgaaacagcattagcagctgcacaaactaaggccaatgccacaaaagtgacagccttaacaacattaggacgactcggaaaaggagctttaggacttgttggtggaccaattggtgcgctcgctttgggcgtttcagccttggccgcaacatacacttattttaaagacaaggcagaagaggcaaataagaagctcgaggagcaagctgcggtggctaatcgatcagccacggagttgaaaaatttgcaaggtcaagccaaaacagacgcaattaaagacttaacaaccgcattcaaggctcaaaatgatgagcttacaaagatggaatatcgggtaggttctgcgttaatcgacattcagaattatgcacaaggaaatgctgaagtagctcggatttcaaatgaagcgcgtttaggaaccattagttatcaagaagctttgcaacaactagcgaaagtgaaattaccacctagcttaagacaggcacttgaagaacaaattgaaaaatataaggatgcatacgataaagccgataagaccaaaacagcaattaaattgtttggtattgaagtaaccatatctggtaataaggctcagaatgcagctattgaacagcaaaaacatgctgatgcaattaaaaatacaaaacaagcagcagatgaggcgcaaaagtcactgaaagaaatgtatgatcaaaaaaacttagatactgattttttaacgatcaacattaaaagtcatggactggaaatgggtaaggcgttatcagatttttacgataacaacaaaatccctaaaactcgcagtttaactaaagatgaatgggcaatattccaaaaaaactttgataaggtgcaagagcttaaaaagcttgaggaggatattaccgcttctaagagacagcaaaccaaggaacttgagaaacagcaaaaagttttagctgttaactcccaagttaaatctaacgcctcaaagtataatttttccgatcttgaatctaaatatgacttattgcctggcctgctatcagcaatcaacatgcaagaaagcaggggtgatgcaaacgttattggtccgaatacaaaatacgggaaagccaaaggtgggttccagatgttggatggtaccgctaagcggtggggattagttggtaaagaagtttttgatactggcaaagctgcagaagcagctgcgaaatatcttaactttttatttaaaaagttcggcaattgggatcaagcaatttctgcctatcatgctggtgaaggtaacgtagaaaaaggtaccaatattggtcctgtaaatagacagtacgttaaaaacgttaaaggatatattgctggatcaaatggttttgatatgaaaggagtctctgaaaaagatttcgattcctaccttaatcaatttcttaaaacgcaagaggaaactgaaaagctacgtgatcagtatcgagataaagatacgcttgcagagaaagaatatttaaaaagaattggtgagttaaagttacattttaaagatgcagagttaaagcaactcacggataaagaaacagcacgttacaatgctcaaaaggagttaaacgctgaacaacttgaatttgaattaaatgagttccgtttaaatgaagttcaaaagctggaaaaacaaaagcagattaaattacttcaaatcaaagcatcaactgaatactctgaaactgaaaaagaaattcgaatcaaagctgttaatgcaatgtttgattatgaaatttctgagtacagaaaacttcaaaagcaaaaattggaggagtatcgaaaaacaatgtatgagcaagcctcaataccacaatcagatgttattaatttactagctaaaaagaacctaacttcttcgcaatatgattcatggaatctacagaatcaatatagtgatgaaatgcaaaatgctaatgatgcatattcgtcaaatgttaaagcgatctcagaagataaaacaatcgttgacgaagagaagcgcttccaggccttattagatgctgaagagctatttcgtcaacaaaagtatgccatcaatgaaaaatatacattgatggaacaagaactccagaaaaatgcccgtcaagctgaaatggaagtatatggccagttattgtctcaagcttctacggtttggggaaatatgactgcgatggtaaaagaatctgctggtgaacaaagttctgcttataaagctatgttttttgttcaacaaggtattgccattgctcaaggtattatcagtacagaattagcggctgcaaaagcattagagttggggccggtattaggtattcctgctgccgccgttgtacgcggtttagggtatgcctcagttggactaattgcagcccaaacaattgctggcttctctgatggcggttataccggtaatggtcttaaacacactcctgcagggattgtgcataaaggtgaggttgtttggtcgcaagaagatattaaacgctggggtggtgttagcgttgttgaaagtatgcgtcaaagcaatccaagtggttatgcgaacggaggttacgtttctaataatcagtctgatgctattgcaatacgtagagagtctagacagtttgaggcaatcaactctaatcaatctcaattgaatacgaacgaaaagccaataaatgtgtatgtcactgttaatgccgatggcacaagtaaaacagagacagaaaacgactcaaaacaattgggccaaatgattggtaatgcagtaagaactattattcgccaggaacaaagacaaggtggtttgttatctaagtaacgcctgaactgtttccacttttccgttaattggggtatagtttaattaatatggtcatactttagttatggtccttaaaagctcgcttattgcgggctttttttgtgagaaataatcatgagtgacttaaaatttacctttgagtgtgatcttgaaggtaataatcaaacccaacgttttaatacgttatcaacaaaatttggtgacggatatgaacaaaatacttcaattggtataaacaatcgatctggtgaatggacctatcagcgcacagctaagaaagctgaaattttggaaattaaagcattctttgataagcacaagggtgctaattcttttctatgggattcgccgttagatggtgaagtgcgcgttaaagcaggggattatcaacctgtttgcttgggtggagatacgtggcgcattacaaccacatttactcaagttttctatccataattttttctcaacggctccttaaggagcttttttattgcttattggagcagaaacatggctattaaaactttagatcttgctgaagcatatattgtcggtgaattacgcactcaattattagatgcacgtagtttcgggaataatttgcctgctggcagaattgaaactttagcgattaattatgatcgaccttctgattcagtgaatattgctgttacaccaggtggtggtttaaacggaagtatgactttacttgatgctgacatcacaaagtgggcaattcaaacgatcttaaacacagcttatctctatcaggtagatgtaaacactttaagccttaaatatgacttggctgctaaaaaaattactattgaatatactccagttgtttcaggtcaagcttaaggaggtctcatgactttacaaagtgacttccagaaacttgaaccaggtggattaattcacctgtatgaattagatgccagctcgtatggagttggcattcttcgatttcatggccatcagcaaatggaaagtattttttggcagggtcaggagtttgaagctattagtctggatgtctctggtttagaaatgagatcagatggtaaggcttcggctcccacattaacaatcgccaataacctgaacggaatacaaggtgcaatttcagcttactgtctccaatgtaaagatttcgttggagctaaactcaaagttataaccacactcaccaagtatcttgatgccaagaactttcctgaaggcaatccaacagcatcaaatgaatcaaaagagcagatttggtatatcgagcagaaaacatctgaaaatgctcaacaagtaacttttgagctttcaaacccgattgattttgaggggttgagaataccagttcgtcaaattacttcattgtgccattggtgcacgatggggaaatatcgtggtgaagaatgtggttataccggcgctgctatgtttacagaaaaggatgagccaactgataaccctgcattagatcgatgtggaggaaggttgcgctcttgccgattacgctttggagaaaacaagccccttccttttggaggattcccagcatcaagcttagtttgaggtcctatgaaactaacagcaaaaatcaaaaaagcggtaatggcccatgctgatgaatgctatccgcatgaatgctgtggggtcattgtagacaaggaatatatcccttgtcgaaatgtagcaaacaaatcagatcagtttgaaatacatcctgaagacttagcttttgcagaagaccagggcgagatattagcgtatgtgcattcccaccctgacggaactacaagagcctcagaactagacttaattcaaattgagttacatcaaaagccttgggtaatttgttcctatccggatctagattttcaaatatatgaaccatgtggttatcgcgcccctttagtggggcgtaattattttcacggttggcaggattgctacgctcttatacgcgatttttatagtcgtgaattaggagtcgaacttatggatttcgagcgtaaagatgcttggtgggaagataaagatcatccatcactttatcttgagaattatgagaaagcaggcttctatgaagtagatacgccgcaatatggcgatatgcttgtttgtcgtgttgggcgtactgaacatcccaatcatgcggttgtttggcttggggataatgggcagcttaaatcggaacaaactgagcaatgcataggttcaagtctaattcttcatcatccatataatcgtaaatctgttcgtgaaatttatggccaacaatggcaagagcgaacagtaaagatattgaggcatcgagatgttaaaaaccattaaactgtatggagtattgggacaaaagtttggccgtgaatttaaacttgatgttttaaatacacgtgaagctatgcgtgcattagcagtacaagttgaaggtttcgagcagttcatgttgaaagcacatgagcagggactccagtttgctgtatttcttaagagtaaaaattcaagcaaaaagcgtggaaagaaaagcccatcaatttatgaccatgaatcaaaacgactgattactggagacaatatcagtgaagaccagcttgatatgactacacaagctgaagttattcatgttgtgcctagagtagttggagcgggcgggggtggtggccttcaaacaattatcggggctgttatggtagttgtaggggtggttgtaggggtgtttgctggatggactggtgttggtgcagttgtggcacaagggttaatcggggcgggtatcggcatgatgcttggtggtgtggcaatgatgcttatgccaaaggtcgataatactcaggaccaaaaccaagatggtaatagggcaaaccaaggattcggtggagctgtaactacggttgcccaagggaaccctgttccagttttatatggccaacgtgaagttggtggattcattgtgagtgctggtcagtatcctgaagaccagatgtagaaaatttgttgtgatgtttttttaaggcgctttaagcgccttttttattgcgcgagatttaaacctatggcgattgtaaaaggcgcgaaaaagggcaaaggtgaggcaagaaaacctgtagttgctccagattccgcacaatctaaaacctatataaaaatcttatatggtttaggtgaaggcgaaattgaaggattagccaatggcaatcaatcaatatttcttgaaggaactccactacaagatgccaatgggaatctgaattattcaaacgtaaaactagatttccgtaaaggaactaatgatcaagattacattgaaggttttccttcagtagaaagtgaaactgctgtcgatgtcgaattgaagtcaggtgctccatgggtacgagcttttaataatattgatcttgatgccgttcgtattcgcttaaagtggggaccacttcgccagcaggactcaagcactggtgatgttagtggtataacaattgaatatgctatcgatatacaaactgacggtggtgcctggacagaagtattaaaaacaaaaatatccgataagacttctgcaaattatgaacgagctcaccgtattgatttaccaaaggccgatagtggttggttaatccgggtacgtcgcattacacctaattcaacctctgagtttgtaagcgacaaaatgtatgttgaggcatttactgaagttgttgatgcaaaattaagatacccaaatacggcattattaggtctgcaatatgatgccgaaacttttggaaatgtggcgaaattagctgtagatctgaaaggtcgattgcttttagtaccaaccaattacaacccgcaaacgcgacaatatactggaatttgggatggtacttttaaaagagcttacacaaataacccggcatggatttactacgacctttgtacaaatgatcgttatggtttaggaaatcgcttaaccccattcatgattgataaatggtctttgtaccgtttagctcaatactgcgatcaaagcgtttccgacggacttggcggccaagaacctagatttacatgtaatgtgtacattcaaaatgctgaagatgctttcagtatattaatgaaattggctggtgtctttcgagcgattgccttctgggatggtacaagcattatatgtgatgccgatataccacaagacacatatttcacctatacccgtgcaaatgtggttggtggtgttttcgaatactcaggaacacgtgcacgtgatcggcataatgtagttaaggttgcgtgggataatcctgcaaatcactataaaacagaatacgaatttgttcgcgatgaaaatgctattgctgagtctggccaagtacgcattcttgaattagatgcgtggggatgtacttctcgtggccaggctcaacgtgcaggccactgggctttaaaatccgagcaaaaggagactcgtacagtttcgtttaaagtcggtttagatgggcatattccactgccaggaagagtaattgaaattgcggatgaactgtttgcaggacgtgctaatggcggacgtgtatctaaaatttctgctgatctcaaaagcataaccattgatcgagatgacgttattgctaaagctggtgatcgtctggttatcaatggcgaaaatggcaaagcacaaacgcgaattgttcagtcgatctctggtcgggttatcacagtaacacttccattcgatgagaattcaattgctgtacaaaacgtatgggttcttgatgctcaagatttagcgacaatgaagttccgcgtaatttcaatctcgcaagaagaaaaacaccaatttagcattacagcgcttcagtacaacccgcaaaaatttgatgaaattgataacggggcattctttgaagatgcacctatttcaattattaatccttcaatccaggaaccggttaaagatgttttgattacgactgaaagtcgtgttgatcagggtattaatatcaccacaatgattgtgtcttggatgcaagcgaaaggtgccgttaagtatctggttgagtggcgaaaagatgatggatcgtggatccggttaccgcaaacaggaaataattcagtcgaggtacctggtgtttattcaggtcaatatcaagctcgtgttaccgcaatttctgcttttgaaatcgcatctttaccggttacatcttccttaactgaaattactggaaagcagggattaccgccgaaaatagcttttatacgtgccacaggtattttgtttggaatgaagcttgattggggattccctccaacaggtgcaaaagatacagcttataccgaaattgaagtttcacctgatggcatcaacaatattgctcaattaggattgtttgcatatccgactaccactaccacaatccaaggtttacaacctaatcttagacagttttatcgcggtcgattaattgaccggattggcaatgttggtccttggtctgaatgggtcaatggtacgaccacagcagatccggaagcggttcttgatcttatttctggtcatattaatgagagtgatcttgcccaagagcttcaaggtaaaattgaaaattcagtcgatgtatctgaagcagcccaagctgcagcaaataatgcccaagctgttgctagtagcgcccaaactgcagctaacaatgcccaggctgtggcctctgaagctaagacggcggcctcgagtgctcaatcggcagcaaccactgctcaaacacaagcttcttcagcccaaaaaatagcaaatgatgcgagtgttatagcgaccaatgctaaaaatactgctgatcaggcagctgaagatgcgtcttcagcaataacggcagcagcagaagcaaaaactactgctactaatgcgaatacgaccgcaacgaatgcacaaacaaccgcaaataatgcttcttcggcagcatcaaaagttgcttcagatttaacaacctcaacaaatcagttgaataagaaaatcgctgatgaaactgatgcacgcacagcggcaatttctaaactgaatgatggtctcaccacagaaacgtctcagcgcaagtcagaagatgctgcactgttaaacaatattgagacttataagtcgagcaccaatggcactttgtctagtctgcaaacgcaaattaatactaacgcgacaaatacaagtgcaaatacatcaaaaatcacttcgcttgactctcgtttaaccacaaatgaaggcaaaaccgcagatgcgattaatgcagcggcaacagctcaacaggtagcaaatacagctgttactaatgcggcagcagcagcatcggcagttacctcgctaaaatcagagttgagtacaggcaaaggcatcaacaatatcattgcgcctttttctgatccgcaagaactatcgccttacattatcggcgcatcaagaactgtcgctttagtcaattcgcctatgcgcattaatggtaaggcttatgacgtaacctttaatgcggttgcaggcagtatttattttggctcttcgtcagtttctacggtcaatactgcagcggcaggtgtggtaagtggcggtaagcgttacatgcttagcgcctacttaaaaaacattgatcctacaaagcaagcggaagtttattttacgctgcattggttcaaacgcacgtcagaaggcgcctactcagcaactcaaacagtattaataaatcaggcaactaacaccactcgagtaacaccgtcaaatgagggtggcacagttagctgtaaagctgtagcagcaccaccagatgcagttgcctttgtggttatctgctctggcaacagcgtttataacgtcgctggttcacgcattctcattgacatgttaatgcttgaagaggtcgttggagtcgatgtccctgcttcgacttggactgctggccctgctgatttaagcgctattaaatccgctcttgatgccaatgcttctgctattagcaatcttaaaactcgtgtaacgaacgctgagggggtaattactagccaaggcaattcaattactcaattgaataacagcgttacttctatcaatagcgaacttaccaaaaaagccgatgcaaccactctaaacgccttaaccaaccgagtatcgacagcagagggcacaattacaagccagggcaattcaattacgtctttacgtaatgatttaaatgccaccaatgacaaggttgcgtctaaagctgattcaagcgctctcaattctttggattcaaaagtctcagaaattgatggaagagtaactagcaacacgagtgccgttactgctcttcaagggcgtgttacgacagttgagaacggactattaaccaaagcagacgcatctgctttaaacaactactacacgaaaacagaggcggattctgctacttctggcgcaatcgacaagttcaacagtcaattgacgatcggtggtgtaaacgttgttgcgaactccgaagctcctcgcacttcaaccgccgcaacgaatcgcgaatatttactgtatgaacgtagcgccgaattaaaagcgttctatgacgaaaaccttgagaagccaatcacgatttcgtttgaaatgagcgttcctgtggctggaccagttcaagtttattcgtcaaatggttctgctcaccaattcgttacttccgttaacgcggttatcgtcaatcagtttgccaaatactcagtaacagttagtccaaaagcgcatacggcaagtacaactgtttcgacaattgagttctatggaacgtatggaactggccgtatcccgacgattcgtaaattacaaattgaagcgggcacaaaggctaccgcttggagtccaagccctcgtgatacaaaggctgcaattgacgccaatgcttctgcaattcaaacgacccaaacaaaagttgacaatatcgatggtcggctaaccactgctacagattcgattacgtcactaaattcgcgcatgtctacagccgaaggaaatatcaacagcacaaatactgcggttggtggactttcgacacgcatggcaaccgctgagggcaagatcaccaatcaaagtgattcaattgcatcgctacaaaatagcgtcacctcaatcaatggaacactggcaaacaaagccgattcaagcgcggtcaataacttaactagccgagtggaaacagccgagggcaagatttcaagtcaaagcgggcagattacttcgcttagcaatagccttgatctaacaaacagtaacttgaacgacgtaaacgttctggcgcgactgttatctcttggcaagcctctacgtgacgaccctacttttaaactgggtatgggtggattggcaccatatgctctacagtcaggctctacattaacaagacaagcggtatcggctgacaatccaacagaatctacatatgaggttttattaagagccactaccactttaggttcaggctggtatccaaacaaccctactgtactcggtggaccaaacaaagcgttcttggttaagcaagtaattaagatgcctactggtcaaagagtctatccatacaacaatccactcggtactggtggctttgtccgtatgttaggtaatgcagagggaacgggtaaatttgaaacttattattctattattcagtgtggtcctgatgctagtaagtctattcaaggtcactttagagtaattaatagcactaacccgccagttcctacaacaagtaatccagttgatgtaattcttgcctcttatgaagtatttgacgttaccgcagtaaatgacactattcctaaagcatatagtgatgccatttctgcaaatgcaaacgcgattaatagcttatcgaatagtgtcactcagcagggtaatactattacttctcatagtaattctattacatccttaaataacagcatcacaagcattaatagctcacttacaaacaaagccgatgcaagtgcgctaaataacctttcgaatcgtgtgacagcggcagaaggaaacattacaagccaaggcaattctattacaagcttaaataacacgcttacgaataatgacttgtcgaatcttgttctcaatcctgacttcatcgatcctaaaaatggatggacgtcaggcgtaattgttgatgctactgatgcagcgccgaatccaccgtcgctaaaagcattaaaactcaataaccgtgatagctattacggtccattcgtaaaatgcaatgttggtgacatgttttatgtttccgcgtggtttgcaacgccaaatacatcagcaaccgcttccgcagtaattggatttaatacccgaaatagtgcaggtacttatacatggtacacagtagcagttaaatcgaccgacaagaatgcttggggctttgtggaaggttatttcacggttcctgcgggtatggttgacatccgaccttggctacaagtgagcattgctgcgtcagaagcagcggggcagcaatggcatgttacgaatattcaagttcgtaacattactggtaacaagaagttagcaactgacttacaagcaacatcgtctgcattaagtacgcttgattccaaagttaccaacattgacggtcgtgtaacttctgcatcaaacagcattgtttctcttaacaatagcgttacgaatatcaataccgcactttctcaaaaagcggatgctgcggctctcaattcgctttctaaccgggtaaccactgccgaagggaatatcaccagtcagggtaattcaattacatcattgactaactcgttagctgtgagcggaaaaggtggaactaaccttctcatcaaatctaatgttgttggtacttatgatggcatttcatatccgcatcatacttacaaactcggtgaagattgggaaattggggctacatatactttaatttggtgtgccgagcacaaacgtgggacaggcgatacaaactcatcacttgctgtatacgaaggtggtggctcacaacatctccaagctgtagtaaatacaaatggtaaggttgtcagcaaagttacctttgttaaaaacagcgcagttgcctctggcccaattatccacttctacatgctcaaccgtccgacagccgacaagggtagtgttggtacggtttattgggcggtgcttgtaaagggcgatgtactcacgactgatgcttggattccgagcgcttatgattatatccctgatagcaacgcaaacgcttctgctatcaccaacctcactaacacagtcacacagcaaggtaatactcttacgtctcatacgaatagtattacttcactgaacaacagtatcaccagtatcaacggcgttttgaatactaaagccaatacttctgctgtttcagatctcgatagtcgtgttacagatgcagaagggaagattactgcaaatacatcttcaatcactagccttacagcaaatttaaaaagcacttcaaatggcatcaccatgtctgcatcaattgatgtggatccagatagtgaatggatttactggaccaaaaatggtgaagttgtgagagctgatgacacatctgcacttggaggaaaagtctatcgatttggtaataatgctggtaacgaccatgtgaacgccagatcaaaagccaaacttccttttgatcaaaataaaacgtaccgcatccgtgctagataccgtcgagtcagtggaacgggaaccatttattgtgcggtgtttggaattgcaaaagatggtgtttcacatgttaattccagcaatacagtgaccactgatgctggctcttctaactattttgttacaaaccaagcgcctgcacttaatgcatggcaagaggttacggtatatgtcaaaggtcgagcagcaggagcagctacaggaggctggactttagataatcctcgtcaactgccaaatgctacggcatttataagtgtccaattccttgcgaactactctagtgcagcaggtgaagtagatctggattaccttattattgaggatgctgacgcgattgctgccaatgatgctactgcgaaagctttatcttcacttgacactcgggtgactactgctgaaggtaaaattacttctcaaggtaattcaattacccagttaaacaacagcatcacaaccattaatggcactttatcaacgaaggcagatagttcagcacttacaaacctagccaaccgggtaacgacagctgagaactctattactagccaaggttcaagcattacctccttgaatagctctgtaactggaatattgaaagatattgaagttacagatacccgctcaaccaaccaaccgccatcgtggtattggtcaaattacccgaaacggattgttcgtgaatttaaacaggcctcaacaatcggtctatcaggaatggggacatatgtttcgcttgaaacatacgtttattatagcgacgctactggtggacctattattcaaattgcacgtggcacagattcgaaactgaccgccgaacgccgaagtacaagtacatcaacatggggtacttgggtacaagacattaaggccataagtgatgggcttgcaaataaagctgaagcttcagcactttcatcacttgactcaaaagtgtcggttattgatgggaaagtttctacacaggcctcaagtattactactctgcaaacaacagtaggcggtaatacagcctcaattcaatctcaacaacaatcaattgatggcctgaaagcaagagcaacattgaagctgcaatctggcaatctggttggtggcgttggtattgaaaatgatagcaaaacggttgacttcatcattcaagcaaataagtttgcgattggtgcaccttctgatgtcactagtgctgttacaccaaaatacgcttttacttatcaatccaccccaacgactttgcctaacggcacagtcattcctgctggcttgtacttagacagcgcgtctattagctatatcaacgccaacaaaatttatgcagatagtttaagtgctattagtgcaaatcttggtacctttacctcattggcagatcaatcaaaaccaaatggtgctaggactgtaattagtggtgagaggatcgaagtttacgacgaaaacaatgttatgcgtgtacggattgggagatggtaaatgcccacaggaatgataataaattctgaatcaggggaagttgtttttgatggaactgtgaagatccctaaaatactagggaaggttctaatcgagaatggacaaacttcagcagtattaaaccttaacaagccacttgatggcacgatgttttttattccaaaaggattagcaactacagtcgatccaatctatgcccctttgggaattaactatgaagtaagtcttagttctaacaagcaggttgtaacggttaaatacatcgcgaccagtgagcagccaaaagcagggactgattttgaagtttatattggtgaatattgatggataactatttcttagtaaagaatgacttcataaatgctattgatgatgactatttcaatcttgcatttattagaaaacaacgttttaacttcacatctgaacctgggattacctattactatcgtacttttgaagtagatataacagggatagattttcctgttattgcaattagttgtgtttgtccttctgcttatttaagtatgaaagccaatacgctttctattgtttgctcagcaagtaattatgatggtgtggctaattcagttagcaatttaaataattcatctaagtatttagatgtgtttgtttttggtcgattgcctagaagcagtattccagaacatggtattggtgtagtctgtttagatgcatcaagtaaagtagtttattacagtggtgcagagtatttgaaacccataaaaatgtttattgatcccaatacttatcgaccaatgtttaattcaaactacaatactcaggtcgagtatttgccgattggcaagtcttatgcatgtattcccttaaatagagtaaatactgtttattcggagtggacgcctgaaggtcaagatgtcatagcaatgtcatcagtttgtgctattgagggcaatactattacttatacctcaaatcaggtgcaagtcgcacaagatattagtgctgtttacaatggatattgtagacatatgtacatgttaatcgatgtatcgaactattaataaacctttaattatcagcacccaattcgggtgcttttttattgcctacgatctggaggatggcatgcatgaacgatcagacaaatagtgtagttggagcagctgcaagcacggctgccgcgactgcaacaaaattcacttatggttatgtagtgggagggagcttgatcggtgttattggcaaaattgattgggctgtagtcttttcgattttaatcggtatcgcaacctttctgacgaatctctatttcaaaaaaagagatgataagcgtaaggatgagattcacgagctacaaacgaagcaatatgagctaactaagaaacgattggaagggggttcagatgacaagcgaacagactagagcttatctggcttttgcacttgtggcgttaatgttcgtactggttattgctttattttttgtgaatatgccacgtgagaacagcaatttaattaatacagcattgggtttcattgcgggggcaatgacaactgcctgtggattctatttcggaagctctgaccaggaaaagaaaaataaaactgaggaatcaactgagcagtaattaacttaactctaaatgccgcctacgggcggtttttttataactgaaggaaaacgaaatgaatatcgaacaatatcttgaagagttgatcaagcgtgaaggtggatacgtaaataacccggcagaccgtggtggtgcaactaaatatggcatcacacaagctgttgcgcgtgaaaatggctggaatggcaatatgaaagatttgccgcttgaatttgcaaaaagtatttataaaaaacaatactggttggaaccgcgttttgatcaggtaaatgcacttagtccatctgttgctgaagaattgttagacacaggagtgaattgtgggcctaactttgcaaagcctcttttacaacgtgctttaaacctgctcaataatcaaggtaaagctggttggcctgatttgaaagtagatggtgtttatggctcggctacactgggtgctttaaaaacttatttatcaaaacgcgggaaagacggcgagaaggtgttagtacgcgtgctcaatatcatgcaaggtcaacgctatattgaaatttgtgaacataatccaaaacaggaacaatttttctatggctggatttctaatagagtggtgatttaaatgactcaagcagaaaaagtaactgagcttactccttatcttgagtactggagcagtggcatctatatgtttaagtgcccgggttgtaaatatttacatccatttcatgtgaaagaaggtgcacatcataatggcagtacttggggttttaatggcgatataaataagccaacgtttacaccttctttacttgttaatgaccattgcccagcgagtcgctgtcatttgtttttgactgatggaaagattcaattcttatcagattgtcatcatgagctcgctggacaaactgtcgacatggtaccgatagatgtttaaagttttattgctgtgtattctgctttccggatgttcagctcatacgatcaatagtaatgtgagtgtagccatttgtgtaaaagccctctaaggagggctttgtttgagaaaatatttgctcatttttaataaaatcaattgattttgagcaaaattattcacatttaaaaactaatcttgtttattagtttcattctcaactttgacaaacataacgtttaaagcgcctttcctaaatggagactcatacgtcaccgctttataattaggaggcaaagttgtttgcaaagaggttaccgccgtcgcagtagcattaggtccaactctgcaaatgagctgttgatccgaaggtgttggtgtcggctctttctttgtgccaaataatttacttaagaaacccataacatccatacttcctaattttatgcatttaatgatttgttgagctgctgaattgcattactttgttttttaattcggttttcggcaatatcaactgtaaagcttaatcgttcaagcaccgttgtaaggctcaaatatttttcacgctcttcatcagctaaggtttcaataaaagcctcttcaggagacatggcggcaagtctcatcttatacatagatgccattgccaaagcctcagatgacttcagtgaaagttggtgaagtcttgctgccttatttctttcaatatttgtattaaccattaaagctataacaaacaaggcaaccaaaactataaatacagtaagcatgtactagatactcatttcagacatgttttaataatattaacccagtattgaatgaaatgctgaattattaaaatgatccttcagataacttatgagcattaattgacattttgtaccaactggcagaagttggccagtcattctgcagtatttggccaactcatcaattttaatataaattgttgaaaaataataaacacaataaaattaatataattcagtgattggcattttattacaataaaacctattccgttttagtctccttaaagatcttttctagcaactcaagcatttcatctgaaagttcttttcttataatccactcagtctcagtaatttgccacgcaaccccatgagttatattaaaagttggtgttggcacatgtgcatctcccttatgtttatctgctggcgcaaactttgctaaaggcatccttattcgcgcaagctttaattttaaagaataaatttcaggctgatatttattataaatagccatttctggcttttttttaaaatctttatcattcagcaccctaattatttcatacgctccaaataaccaaagagttgcttgcgacaaatgctcaatagtatatgcattaaaatctaaatctcccttatcacctttcataaggttttttataataattttatcgaaaaacactaagcgtgagtccagtctccctaagctttggaatgtggagataaaaaaaggctctacttttcctagcgcaaaagaagccttgacccatctatttaatcgatcttcatcaataagactcatatatgctaaggcaaataaaggcgccatttcttctttttgatctatcatgctatgcccagttaaaaataatattagaatataggataacttgtatttttgagacgttgatatgacgagcgaattaattaaaatttacaaccatgcagattctcgtattgctgatctactggctgaaatagacaaaaagggagaggtcacaaaaatctacgacctcaatggtaacgagctaaaaattaattttctgcgagatgaagtttactataataaagcttggtggcattttcagaaaaaacaaaaataaaattacttttcaatatgatagttctcatcaaaataatagttatcagaaatatctaaccacgcttttaattcatgctcaaattcaagtactcggtttttaaacaaccgaataactttatttttcttaaagctgaaatgtgaagcttcaggtggtaattcactccagtctacttcaccatgttcaacaaaccagtcctcccaggcaatttgaatctctgtgatatagaactcttgcttttctttgttccatgcaaaagggaagggcgtatttagtttcttaacatgttttcggatgaagtacttactttgtttatgtgtctctataaatttttccagttgagttttgataaaattgtatggaacatcaatttctaaattttccgaaacttcaaaggcctcaaacgtgtcaatttctgagattacccgttgtttcttattccattccttatagtgattattataatcagcttcggctacactcatagcttcagcaaaatctaatcgacgtccacgttttttcagattcacataccgttttaaagtattccatgattcatgcaaggtgatcgtttgtagttttggaatcgaaaacccgtcttccgcatatcttgtagcagcttcatgccgtaaatcatgaaagcgtaaatcctcaatttctagcgcattacaagcacgtgtaaaataaacagagactgttcttgaattaaccggaataagtaactgatctgaataaccaagttctaagattcgtttacgggtatcatgctctaaaaatttatttgcgagctcaattgccttaggctcaaagtgggcatatttgtgattaccttcagatccatcgggatgctttgcatcacgtaccagccattgtgaatttgcccgatcaaagtccgtcaaacgtagagtacacatctcatcttcacgtctacccgagtaaatcgcgaaccacataataagatgcattgggacagattttttcttacgcttccatgttttataaaaaaaagtcgtcaaggcttgcaattcttcatctgttggcaggcggtcacgtaatttgctctttgtaactattcgggccttggttaagccgattaatgctttctcaaattctgaaataacattttcaaggggctcaccccaaacgaattgagcgtggaccaatacagcttttatatggcttaaatctttcaatgcggtggaaggtgcaaccccatcacgaccagtgattggatctcctttacgtctccagatagcaaagtcagaaaaatcttgtcgtgttaatgaatagatatttttctctgaaatctctaaactagcgataaatttcaaagcacttgtttttgattccgcgaaattatccgcctcatctaaatattgagtaataaattcagctaaagttttatgcttaagttccgcatccggatttagcatcttttctggattcaactcaatttcagcttcagttctttttatccactcatcagctagtgatttcttactgaatgtctttgatgctttatacggtggataaccttcacgttgaactcgaacttgtgctctgtagcgtactgtgccgtttttaagttgacgtttagtgactgttcccacggaatttgcaccacaaaatatttaaggtgcaaatagggtgcaataaaagggcgctagaagtcaataagaggcgatttaacgaagttaaacgaggtttgaagaattgagcaaaaacaccgttataaaagaattgttcgataaatcaatagataagaaactttgggtcgcccctatggccggtgtaactgaccgtccatttagaacgctgtgcaagtatttcggtgcgggtcatgcagtcagtgaaatgatgactgctgacaagactttacgtatgactaaaaaaagtctttatcgtgctaattttgatggagagttagctccaatttctgcacagattgctggttccgatccagaacagttggctgaagcggctcgttaccaagtcgcaaatggcgcgcaaattgttgatatcaatatgggatgtcctgcaaagaaagtatgtaataaattagcgggttcagcattattacaagatgaagatttggtagctcgaatattagatgcagtcgttgcagcagttgatgttccggtaactttaaaaacccgtttgggatttttaaatggccaagagaatattctacgggtggctaagcgtgccgaagaggctggcatcgctgcattagcactacacggccgtacgcgtgaagatatgtatttaaataccgcccgttatgaattgattaagcatgttaaagaattaatccatattcctgtgattgctaatggtgatattgatagtcctgagaaagcaaaatatgtactggactatactggggcggatgcaattatgattgggcgggctgcacaaggtcgaccgtggatttttcgtgaaattgcccattacttaaaaactggtgaacaccttgctgctccgaatattgaagaagttaaagaagtgcttttagggcatttgtctgagttatatcagttttatggtgaatactctggttgtcgtattgcccgtaagcatattgcttggtacaccaaaggtttacgctcaagtaatgagtttcgacaaaacatgtataaagttgaaacgactgctgaacaagctttagttgttgagagctattttaatcaattacttgctgaaggtaatttgatgagcgatgttcaggttgaacaggttaatttattagatactcactaaaataaagcaaccagtacagagactggttgcttggaatttttatctattcactgtctagcatttcaacgaccagttgattaaccagatcgggtgcttcaagttcacgtatttgtgcaacgttacttcctgcccaaaaagcaccaaaaccgtaatcttggtgtttgcttgcaatagcatttagttgctttgctaaatcataggtataaggatattcaggttgtacagggcgagtaggtgaatcaatttttgtatgccaatggttgagtatcccccgagcagggcgcccagaaagactagcactaatctgtgttacaggtttactaaatagggctttgcggtattcggcagaagcatttgaagtttggcattgaacaaatgctgtccctaattggactgcggctgcgcctaagcccaacatatgtttggcttgtaagccagtcattatgccacctgcggctacaactggaagtgtacagtgctgcacaatcagttgaaccaagtcactagttttaattgccccatcaaaagtctggttgaaaatccctctatgtccgcctgcctcaatcccttgggcaataataatatcgatgcccgctgcctcaatagcttgagcttcgatcaaattagttgccgaaaccatagtcaaaataccagcctcttttaaagctttaatttgatgcggatgcggaataccaaagtgaaaacttactgcttttggcttagtttctaaaacaacatttaaaaaatcatcattgtctaaaaaacttggatagatacagtgtaattcttggggcggttgagcaccgaatttttcaaaatgaggacgtaggtaatcaagccattgttttgctttttctacattaagctcagtcgattgatgacagaaaaaattaacttgaaatgggttttccgtgagcgcttgagtttttaaaatttgttcacgtgcactttgcggtgtgtttgctcctaagcctaatgatccaaggcctccttgatttgaaacctcggctgctaattcaggagtagagacgcccgccataggagccagaaaaattggatgtttgattgcaagttgttgtaataggctcattttattcacctcaattctttctcttcaccataacgtgaaaatagaatgaagagcaaataatattggctatttaatttttaaatattaagagtcttatttaaaaaactctcttataaaggagtgacattaaataaggaaccaatccagcttgaaaaagccatcgctaaaataccccataaggtaatacgtaaactacctttgattttagaagtgcctgcaaaataactcgaaagggcacctaaaattgctaatgccgcgatacctgtaataagcacacttggcataattaaatgctctgggctaaacaaaatggcaagcatagggaaaaatgccccaaatgaaaatgatgctgctgaggagagtgctgcttgaattggttttgccgccgtattttcatgaataccgatttcatctcgggcatgtgcacccaaagcatcatgagttgtaagctgaatagccacctcctttgctagttcttttgaaagtcccctagaaatatagatttgagttaattcatccaattctttttgagggtatttttttaattcttttgcctcaatagctaaatctgatttttcaatatcttcttgagatttaaccgaaatatattctccggcagccattgaggttgcgcctgaaatgagcccggcaatacaagtgataaatagagtatgtgagcttgccccacttgcagccatccccataattaagctagtcactgaaataatgccatcattagcgcctaatactgaggctcttagccaacctgagcgttgaatggcatgatgctctgtatgatgtggaaaagccatgtgtttttccttattaatgttttataaatgctatgaaattttacaatttattggtcaaaaaatatgtcattattataggaaatttagggataagacagaatagatcaataataaaaatggagattaaacaattattttaaaacatccttaacctaacttaacgatgtaacttattatttttaattataatatttattgatcattccagagacttgccctccctaataagtctaatttactgtagaggtgaaaatgaaaaatatcaaaacaataaactctataacacattcaatattactgatgggagcagtgatctcttctttgggaatgatcggtataagctcagtttatgcacaagagcaagtcgaccctgcatataagcccggtaaccctatttatgataaatgggatagattttataaaattgaacagtctcaaccgcaagaagcagaaaaaatattagttgagcttagtaaactgacaccaaccgatattaaagtctggaaaagtcttacttatttacagattcggcttgaaaaaagggtagaagctttacaaagcttaaggcaagcaagaaatttagctcctcaagatgacaccttaaaattacaagaagcttatttgctgaatcagcagaaaaaagatcgtgaagcattggttttatttaaagagttaagttcctcttcagaccctgaaattgctgctaaagcatctcaggcagttaaaaatttaagtgggggagaagttaaaccatattttagagatatttattttgcaccgtcttatgagtcacgttatgacgatgtgatttttcctttaaaaatgaggtatggcaaaaacatcgataacgggcgagcccaagtatatggctttcttaatttaaaccgcgatactcaatcacaaggtggggtccgacctgaaattattgatgaaaatgcagccactttaggggtgggggcaaattatcaaccatggacttccattcctgtgcgagcctatgtcgaagttggtggaagttatgacttgattgatagaaatagaaagcgatttcgtgagagtgttgtaggcggtgtaacgggttatcaagaatggtattcacaatcaaactgcgatcattcactttgtttagataattattttactgacttatatggcaatgtcgcgacttattcgagagaggactataacgttattggggacttacgcttacgcacaggtttaaatctctataagggtgagagtgggtctgtgcaggcttatgtgaaattgcatggcttagcggatagcgaagatgaatattacaataatttatttgaatatggcccaggcatttcatggcagccttttaattatcaaccgataaaactacgggttgaacgtctatatggcaattattttaaagacgtaccggttaatacaaaagatcattacaacaatactcgtgtagaacttgttttttataaggatttctaataatgaagaaaatttttatttcaattgtatttggtactcgtccagagctcataaagttggctccggtaattttattagcaaaacaagactcacgatttcaggtagaagttatttttacaggacaacatgatgaattagttcgagatgcgatagatttctttggggttgaaattgatcatcgtcttaaaattatgaatgctggacaaagcctgaatcagcttttaattcatggcttaacgcaacttgaaaatatctatacagatagtcaaaaaagagatgcaattgttattcaaggtgatactacaaccgtattagctgctgggctagttgcattttcaatgaagattcctgttgcccatgtcgaagcgggtttacgttcttatgatttagatcatccatttcctgaagaaggcaaccgccagttagtttctcgtattaccaaatggcattttgcccctacagaacaatcaaagcgtaacttgttaaatgagcagattccaccttcattgattacagtgacagggaatacggtagtcgatgctgtgtatttaggaaggaaactcatagctgaaaagacgggtttgaaaaatcaacttgagccttacggaattgaattaaaacaaaatgataaagttgtacttataactgctcaccgccgtgagaattttggcgaaggaattcagaatatttgtaatgctgttgagtatttagcaaaacatcatcctgatttacattttatttggcctgtacatttaaatcctgctgtacataatgtagtgcacgataagtttaaaaatcatgctcaaattcatcttgtgaagccactcgattatccaagtttattggccgttatcgaccgctccacctttattttaacggactctggtggtttacaagaagaaagcccatcatttaataagcctgtcttaattttaagagacacgactgaacgcccggaagtggtagaggtgggagcaggggtattggttggaacaaatcagcagaaaattattgaagaggctgagaaacttttaacggattcgcagcattaccaaaaaatggctcatgttgaaaatccgtttggtgatggatgtgctgcccagcgaatattagatgaaattgccagaacttataactagagatcatttattttgagttttctggtccgtttatggtggcgggtgtgctgccataaacgaatcgataccatagaccgacaatataaacggaccatcggcccatatagtgggggccatcaaaaatataaatttttttcccttcatacgccttaatttgagagataatttcccaaggataggctgcacgaaattgaccatttttcttggttcgaaatgcttctaaaacaataaccgttttatcttttccaagtgtctgctcaagttgatctaaaatgcgtctagcttgttcgggagttcttactccgacacctacaccatcttggaaaaaaacgcctgcttgttgaggaagccagcttttaacccataaatcgtagttttcgggttcactttcaccactataaacactaacccaaataggtgagggtaatttttccaaaacatgtcctaaggtacttactcttagccatgttgggtcggcttctactggaaaataatagccttttaaagatgcatcattttgttcttgaataatttgtgcagatttttctcccaaagcaacgacattagcacgcgcttcgtgttcattatattcacctgctaaccccaatataagatttttagcccaaggttgctgtttaattttttgtaaatcaatggctttttcccattgaggaagattggagtttttccaccaagatttagattcaacgactgaccattggggaacaaaagtatttattcctaagtaatgccagtttcctttaggaggagtagtatcattgtcaggttgccagaagataccctcaataatgggaggttgtccatgatttttgaacaaccccgcataacccactacactacatataattaaaataataaaagcagttattttaattggtatctgttttttcattattacgtcgtaaccaataccacaagaagatcactattatcataattgcagagataatcacaactaataaaaagaatgatgattgctgaactaatggcgctttttgattacctacaattaatttttgaagaacataaatattgccgttttcagacaccagcattttggtcacattatttgggattttatgctgtatttttccccataaatgcataaaggtttgtgcaccgttttcagagtctgtaattacatcgaagcggttattgttataacttacgataaagccattcgctgctgcgggtgcataaataatattttgatgcattaagacttgttgctgataaatctctttgttcactctcacattcactgcttgtggggaagtcggagagaagcgtactaggttcactggcattggtgcctgtgtcagcagcatgtttttagcgacttgtcctaaaataatggcaatatttaatgcccctgattggtcatcaattgcaatcgttggcttggtggctaaggtcattgaaagagcagcaacaccatttttaagtttatggggaagttttaccgttgatttggcggtatcaacccaaagtgagccgtgagcattgggtaaacattgagaattggcaataaccgagttttcaagtttcaagctaaagttggttgtatttgaaatttccttggcaaagatgttgaactgtcggtttacagggtcggatgcgagatccgccgttttcatacttcctgcaagtcctccatcaatccatgctgtaatatttgaaccttgtaatagtccactttgaatacgaagtgcgatttgcccttgcagaatatcagtaggttgccatactgccggaaaatcaagaaataaattcttttcggcatgatttagtcgaaaatcctgaatacctagatctgcaagcgtatcaatttttttaaattgcgcccaagctggtgctgagattgtagttggaaaaatagcgctacccgtatcaagctgttgcacataagttggattaattagcccgttaatggcagcggtaagctcttgtggagtgtgataagtaatagatagcgtcggtacaccttcagccagtttagcaatttgtactaaggctcctcctttgagtgggcttgccgaacgaatcacttcaataataaagttcgtttcaggatttagattggtttggcctgaatcaacccattcaattggcgttacggagctccacgaacttactaatcggcccaacatagaggcttcggtaatttctttacggttatattttaaaattccgacaaaaggtgtaggtcgtctagcctgagggttaaataaagcgtccggtagatcttttaaacggtactcatttcgaataggcgtaaagtcgagttgagaattactcaaataagttaagtgatcaatatcttctgtacagaatgtttcttttgtttggttaagcgtcgttggttttgcatattgttgaataataaaatctaaacggtgaaaaccactctgactggcaggaatattaaatttgaattggccatcaccattaagcgtagtgttataaatgagcttatcgtcatatttgacgagtactgttgtgtcattttcagttgagtagtcactcgaaaactgaatgttttgccattcagcaccttttccaatatagaaaaagtgaggctcgactgtatatttagtcgaggtactaatatcgtcgagtttccatgtataagcatgagtagacatgccaagcaaaaaactggtgctggcaaggagcacttgagctgtttggtaaagatcaaaagtctttttcatttattttttctccttgctacgttccgttttgtaccattgaagggagttgccctgtattttattttttagcatgtcgaatgcggctttaaacacaataaataagaagatttgtgagtaacttacgtaagataagacagaataaaaatagagttctggtttaactttttctaaagaaagcgtaaaccacatttgtgctacatagagacaaaatgagagtccccacagtagtgtaaatggaccaggaactgaaatacctgcaatatcaagtaagccaagcgttaaggtaatatgactccagaataaagccggtacaaaaaggatatagcacataatgttatttagaatttcaattccgattgggaatggggttctgagtgctacaggtaaatatttgcgtgttacataaaaattaccttgagtccagcgtgagcgctgtttaacgaatacacttaacgaaggagggtcctgttgccaaccgattgcatagggaacccatttaattcgtttttgtccgataaaaattcggaaactcatttctgtatcatcgactagcgatttttcatcaaaaccgcccaaagtctctagagcatcgcgccagatgacataatttgttcccattaatgttgatagttcaaaacgttgccagcgtccaccttgaaagatccattggaaaaagatgaattcaatcgcaataaaacgagtcaaaatactatcttgccagttacgggttctgactttgccatttaccgcgactagctttttatcggctaacaaggtttgggcaagtaatcggacgcaatcgggttcaggggtgctatcggcgtcgtaaacaacaattaactcacctttggcatggggaagaccattattaagcgttcttgatttacctttaccacccatccctttgggtacattgacaatttttatgcaaggataaatttttgcgaggttttctgcgatttcaagggtgttgtctttggagccatcattgatcagtaagacttcataagactttgccggatagtcctgttgagcaatggcatgcaaagtgtcctcaatcacaacgccttcattataagcagggatcaaaacacttaagactggccatctttctggtattggtaagttttgcagctctttttcagccgttttggaatacttccacgcttgatagcttaaccatgcccaaaatgcttgtggaatccaaatacctaaaaagccaaataaaaacaggatatcaattggagccatttttacggaccctcctaataatagaagagatgagcagcaataataaaattgcccccaccactaaggagatccatgaaatatagctaccaaacgtgccgagtagatccggatacgtcgttgttaaaatcaggtcaagtggaacaacaacaatacttaatataataaatatataacctataagattcgtacttacatgttcaggagtactctcataatcaatattattaaagttccaagaaatgccgagttgaggatatcgaatattagatagaggtaaatcagcagggggattaatgataatttcataacctgaaacatgaccgttaaaacccttggccgagtaaaaaaaatgttggccttgtctgacttctcttgagggtaatggtaaatttgctgaatttagctggataatataactacctgctggttgagaaattaaattttcatcccatcccgtactcacaaaagcagccattgggcgtaaaccaatagcggtcgaaaaagttgcttttgcggcaaaatattgaggttgttcagttttaaaaagcacaataggaatagcaccttggcttactgcttcttttaacaagaaatagtgaggaaaaccgaatacttcgtctggcaagataatgccgggtctaattccgttatggataaacttttggaaactttcagagctaatctgatcaatcgtaaagacaggccaccatgtatcttggtaagggaaaaacatggaaagatcactaggactttgaacctcggcttttatttgctcagctttaatttcgcaatgataatattgtcgatagaactgttgtaatgtggcatctggatattggctagaggcgattacaattccacaaatattaagaagattagacattagctcatctcctcgggtggaagaggaacaattttgtattccacctcaagacgcaaggtcgtaatttcttttaatttttttaagaatacagggtcttcttctgttttctgctggcgaatcataatactgtaaatattttccagatcatcatctgcaaactggaaaacaatctcgttgggttcatgttggctcaaaattttaatcatttcattttgagttgttttccagacatcatcgcctaacatttctttaatcagactgcgattaagaattcgaatttcgaatacttcataatcttgtacattgtggtgatcaagtaatttaaaaaaactacgctgaaagtattttaaagcactgagcgggaaaatatcgcggcgataatttcggtcatagctttgaatatcacggtatttctgtacattaatttcaatattgtggcgtacggcacttagaaagagcggtattaggggaataatgaatagtaaaagtaactgacgttcaatatgtgtttgtgcgcctaagtcgagtaaaaagtatacggcaactccaataaaagccactaaacctacaattaaagacaaaccgacttctaaaaaagcacctgaaattaaaagaagaagaataaaaatccaacttcctctaaaactcacaggcagccactcgtatgcaaccattcccataaatagatgagctgcgataatccataagacgagtgttctaccggggtgtttttgttgcatgtggcctatgctaccttttttgtaatgttaatttttttatacttttataatgaaaggtgttgatttgcgaagtagttgttgtttctgtcctttttaggtatctattatgtttatttgtagattaaagccactgtatagtcaaaccttgttattaatttttcatcaaaaataaacagagcagactcaattgttatctaaatattcttgaaagtttcaattgctttaaggcgtgtttcttttaaatctactatgggttttggataatttaaaccaagatcggttttgcttgagtaggggtcatgaatcgttttattgtccaaatgagtcaattcttttatccattggcgaatatattcaccctccggatcaaacttctttgattgagcaattgggttgaaaatccgaaaataaggtacggcatctgttcctgttgaggcacaccattgccaaccgccattatttgcggcgaggtcaccatcaattaaatgttgcataaaccattgttcaccaatgcgccaatcaatcaaaagatttttacataaaaacatggccgtaatcatacgtactcgattatgcatccagcctgtttgtaaaagttgtcgcatcccagcatcaacaataggaataccggtttgacccgtttgccatgcggttaaatgttctggattatggttccatttaatcttctgagtatctttcttaaacgggatgtgtttagaaacatgcggaaaatcaaataaaatatgttggtagaactctctccaaagaagttcgtctaaccatgtttgttggccttcattgactaagtgaaagttgccatgttgattgcgaaagagtgcttgtaaacactgtcgaatagataaaataccaatatttaaataaggtgaaagcttacttgtagcttgtatatgaggaaaatcgcgctcgactttatagtgacaaaccgattcttcaataaattgatctaattgttctaatgcgtattgttcgccaacaggccataaatcttgctgttcttttgagagagatgagcaaaatagtttttcaatttcgtctaaatcaatatttttcccctgtaaaaaatctagtggtacttcattttgtttattagggaccggataacattgagataaaccgcttgtgtcgagctttgtataacaagcttttttgaatgcactaaatacttgatatggttgttgtgattggttacggattgaacgtaaaggaaaaatagtacggtcatggaataaaaatagttctttgccatgccgatttaaatagtcttgtacatttttatctctttttaattcatttacgcctatttcgatattggcatacacgttttcaatattatatttcttgctgaaatcagaaataaagtttgcgatctctttccaatagggaatgacttgaataactagtggaatatgaagtgctgctaactctttctgaagcgttctgagttgtcgtaaataaaaacttatttttattggagcatcggcgtgttgtttccattgctctggcgataagatgactaaaccgagtgaaggtccttgctggctggcgtgccataaagctgcatgatcatgtatacgcaaatcttggcgaaaccaaatgagctgataagcatttgacatgcaagtccctaaaaataaattaactctatgaatattatataaattaaagacataaaaaaagcaaagccgaagctttgccttttattatcttctaaaagaagacttagtggtggtgaccacccgcaccgtgtacgtgaccgtgatctaattcttcttgagaagcttcacggatttctacgatttcaacttcaaaagttaaatcttgaccagcaagtgggaagtttgcatcaacgataacgttgtcaccttcaactgctttaacagtaacgatttgaacgccgtcatctgtttgagcttggaattgcatacctggttgaatgttatcaacgccttggaacatttgagcaggaacttcttgtactaggtctgggttatattcgccataaccttcagcagctggtacgttaacagtgaatttatcaccaacagtcttaccagttaatgcattttctaaaccaggaatgatgttgcctgcgccatgcaaataggcaagtggttcaccttgagattgatcaagtgtttcaccctcagcgtttgttaatttatagtggaatgaaaccacgtggttatttgcaattgcagtcatgtttttgatccattcaatcaattaaagcgtacatcataaagtgaaaaataaattttgtagactacaaaatctcaatctttaacactttttctaatgcgtttttatctaaatagggatgaacttaaaaaattcaactcaatacagcttaatttttggtcgtactcgtcttgtaagtaaatctttcattgtgagtagtccagcttgagtgtatccgtgaattgttgcttgatgtaaacggtataaagatacatacatcgttttggcaatatatccttggacactgacatcccccagtaattctccaaccgctttattacgacttaaagacacaagtgaacctttgtcattaaaagtaaacatcggttgtgatcgaccatttagtctagcagccatagcatcgactaaaaagcttgcttgttgactagcaacttgagcgcgtggtccgagaggcgggtgtcttgcatcaagttggcaatgcgcacaatcaccaaatgcaaatacattaggatcggaataggtctgcagcgttgcatagaccattaagcggttaatattgtcacgttcgaaatcgctaagactttcaagtacttttggtgcttttaccccagctgcccataccgtaatatcactgttgagctggttaccattactaaaatagatacagtgttcatcaattttttcaacccggtgcttagttaaaatttcaacacccattttttgaagctgttttgcgctatgttcagctgttttttcacttagggcagggaggatgcgttctgaggcctcaatgagtgtaattttgacttgattcggatggatcttttttaaaccatagcgataaaagtttttggtcgtttcaatcagttcagccgcaagttcgacacctgttgcccccgcaccaataattccaatatttaatgtacgttgatcgggttgattttgcgcttcgatatataaatgtaaaagatcttgctggaaaatatccgcctgtttacggctatcgaggaaatggcagttttcacgaacaccgggtgtattgaaatcatttgatactgaaccaagcgctaaaaccagtgtatcgtaactgagttgttgaatatgggtattttgttctttagagacttgagggggaattaaatcaattattttcttatctttatttactgctgttaatgttcccaacacaaattcatagtggtgtttctttgcatgggcaaaataattggtttgctcttcgtgaggatttaaagaacccgccgcaatttcatgaagtaatggtttccagatatgagttaaattttggtcaaccaatgtaattttggctttaccatttttcccaaaagtttcaccaagttgtgtggcgagttctaaaccaccagcaccaccaccgacaataacaatatgatgtaagttttgggtcatttttatcacctaattatttttctataaaaaaaagatggctgaattatgccatcttttctttataaaatttattgtgcatctgtgcacaatttgatgtttttagtgcgaatctatagggtagagttttgctgcactgtgctcacttgatgaaaagattgagaataggcttgagaaccacatcataattctttggaaaatatttgcttcttcaatgtgtacatcattttcaatttgaagactgcgaatgagctggttgttttgataaattgaaactgttgccaaattcatcgctttcattaacggtgctgttaacttttgctcatttaactgaatatttacacgtgtttgagttgtttcaagtggagcaataactttaggttgttgattgctatcaagaacttgaatacgctgtgtagcataatcaaacgtatttaaatcaattggtgttggctcagcatataaagaagtcgtaacaatggttggctgcttagtttctactttaaacatttttaaagttgatttaataacaggcaattcagcaattaatttttgctcaggaataactacttcatcacgtgtataagcataagcaagattcattaatttatctgcaatttcagcacgtttcacggcacttggtgtacctaagacaattaccagtaaacgtctttgcggtaagttcggtgaaaatgaagggcgtgaagctgttagagccaagttataacctgctgctttggtatagccagtttttaagccatctacagatggatcatatttgagcgcaaggttcgtcgcatggtgaaaacgttgattgtagctaaagctcggcattttcgaataatgtaaatattcaggggtctggtgaatcactgcctgacttaataagctcaaatcatgagctgtcgtgtaatgatccggcattgtaataccagcaggattactaaagtgcgtgtctttcatacccagtgcttgtgcttcttgattcatacgctgtacgaaatgaggcacatcaccagaaattttttcagccaaagtcacagctgcatcatttgcagacataacaattaaaccagccaagagctgatcaactgaaatttgctcgcccgctttgaggtacatttgtgattcatcccactgcaccacgcttacgactggtgttgcagtaatgacttcgttcagttttaactttccagccttaatctcttttaatgcaatgtaggccaccatcattttggttaaagatgctggcgcacgttgtacatgactattatgctcagcaataatttgaccagattgggtatctacaattgtccatgcagcggcttcaacactttcagaagcaatattaagtagagcagcattggtaagagtagtacagaaaatactaaacagcgtaaaaagagataggaagaatttcactaggtgaccttgacgtttactggcaaatacggaacacagatgcccagcatgctatgccttttttttgtagaaggctagtgtgaattgttgccaaaaaatacatctacgcaagtcgatacaaaaaagtgataatctaatgtgaaaccgttcttatttttaaattgaagaatttatgttgcattatcaaattgagttcgatgattacaaacaacaccttgttcacgtgacaattcgctttttagcgaatccaaatcaggaactatggttaccaacgtggattccgggcagttatctcattcgagagttttctaagcacatcgaggcagtaaaggcctatgatgaagctggacgcatgctcaatattaaaaagactgaaaaaaatcgctggcgtttatttaacaccgatcacgagttaattactgttgaatatgatgtttatgcatatgatttatcagtacgtggcgcttatgtagatcaaacgcgtttatatattaaccctgcctgtgtgtgtttaggcttagaaggccaagaacaatctgcatgtgaattagaaatctttttgccggatgaattaaaacactttcagttagcaacaggattagcttcaaaaagtttagtaaaaggacgttttactttaaaagctgatcattatgatcaactcattgatagtccatttgaactggctgatcaaacgcgttttagcttcgaaacgcatggaattgaacatgagtttgtaatttcaggtactcacgctacgaatgttgatcgtttaaaaacggatattgaaaaaatttgtgcagccgaaattgatctgtttggttcggcaccgtttaaaaactataccttcatgaccatggcaacagggaatagttacggtgggctagagcattgcaatagcacaagtctgattactccacgagatgatttgccgaaatcgaatgaacctactgaaccttcgaaagattatcaacgtttcttaggtttatgcagtcatgaatattttcattcttggttagtaaagtttatccgtccagaaaattttgcgaactacaacctgcatcaagaaggctatacctcgctactgtggatttttgaagggtttacttcgtattacgatgatttaattttattacgtagtggcgtgatttcccaaaagtcttatttagatttgttgaagtcacagattgatcgctatttgcaaaacccgggacgttttgttcaaacagtagcagaatcaagttttgatgcttggattaaattttatcgtcaagatgaaaattcgaataatgcaggcacgagctattataacaaaggtgcattagttgccttgtgtttagacttaggcttacgtttacgtggttctagccttgatgccttaatgcgtcgattgtatgaaaatacgcaaaacggtgttcaggttaatgagcgtacaatttttgatttatgcgaagagctaacaggtgatagttggttagagcaaatcaatcatttgattaatactactgaagagttaccactcgatcagttattccctgagtttggtttaagttatacgcttaaaaatgataagactttagcttatggtttaaagctagctgataagcctgaaggtgtgttagtacaaaatgctcaccgtgagggagctggtgctaaagcgggtatttctgctaatgatgtcattattgcaattgatggactaaaagcgaccacaaaacttattgagaaatatgctaaacaaaagggtaattactcagtcttggctttccgccgtgatgagttattgtcgtttgaagttacaagtgacagcataaacttaactgaagttgaacttattattgaagatcaaagcaaagctgacaaatggttaaaagcctaaataaccgttaattaatttataaaaaaccgatgtttcgtgcatcggtttttgttttttcctaacttcaaaacatagaaagagtctttatctttgagtttgttttgaatgaaaagtataataattgtcagaactctgaaagatatctcatgtaatttaagactgttctatacctaaaaagttggtaaaagcacatttattaccataagttaggtataagattattatcgatagatttaaattatgtattatttcgctgcgaaatgtcgttatcactggatatttcgttgactgaaagccaatgagagtcgatactctcagggttttatttaagcatatcggttcgtaggcactgggccaaaagctcggtcctcaaaactcaattcaacggaaggggctatatatggctggtgaaaagtcaaccatcatttacacactgactgacgaggcgccattattggcgacttattcgctactgccgatcattgagacctttactaagccagctggtatcgagattgttaaaagtgacatctctgtagctgcacgtgtgctcgcagaattcgctgactacctaagtgaagagcaaaaggtatccgacaaccttgctgagctaggtcgtcttacacaagatccagatactaacattatcaaactcccaaatattagtgcctctgttgcgcaattgacagcatgtattaaagaacttcaatctaaaggttatgcaattcctgactatccggaaaacccagcgactgaagaagaaaaaacaatcaaagctcgttatggcaaatgcctaggttcagcagtaaaccctgttcttcgtgaaggtaactctgaccgtcgtgctcctgctgccgttaaaaattacgctaagaaacaccctcactcaatgagcgagtggaaacaatggtcgcaaactcacgtttcacacatggaagaaggtgacttctaccacggtgaaaagtcaatgacacttgaccgtccacgcaatgtaaaaatggaacttatcacaaacagtggtaagagcattgttcttaagccaaaagttgcgcttcaagaaggcgaaatcattgactcaatgttcatgagcaaaaaagcgctttgcgacttctatgagaaacaacttgatgactgccgtgaagcaggaattttattctcattacacgtaaaagcgacaatgatgaaagtttcacacccgatcgttttcggtcactgtgtgaaaatctactataaagaagctttcgaaaaacacggtaagttgtttgacgaattaggtattaacgtaaataacggtatggctgggttatacgagaaaatcgaaactcttccaacctcattacgtgaagaaatcattgaagatttacatgcttgccaagaacaccgtcctgcacttgcgatggttgactcagcaaaaggtatcactaacttccattcacctaacgacatcatcgtagatgcttctatgcctgcaatgatccgtgctggtggtaaaatgtggggtgctgatggtaagcaatacgatgctaaggcagtaatgccagaatcaacatttgcccgtatttaccaagaaatgatcaatttctgtaaatggcatggtaactttgatccaaaaacaatgggtacagtaccaaacgttggtttgatggctcaaaaagctgaagaatacggttctcacgacaagacttttgaaattcctgaagcaggtattgcaaacattactgatcttgacactggtgaagtgttattgactcaaaatgttgaagaaggcgatatctggcgtatgtgtcaggtgaaagacgctccgattcgtgactgggtaaaacttgcagtaactcgtgcacgtaactcaggcatgcctgcgatcttctggcttgacccatatcgtccacacgaaaatgaattgatcaagaaagtacagaagtacttaaaagatcacgatacgactggtcttgatatccagatcatgtctcaagtacgtgcaatgcgttacacacttgagcgtgtagttcgtggcctcgatacaatttctgtaaccggtaacatcttacgcgactacttaactgacttgttcccaattatggaacttggtacttctgcgaaaatgttgtctatcgttccgcttatggcgggtggtggcatgtacgaaactggtgcgggtggttcagcacctaaacacgtacaacaacttgttgaagaaaaccacttacgttgggattcgcttggtgagttccttgcgcttgcagtttctctagaagaaatgggtattaaagaaaataatgctcgtgcgaagttacttgcgaagacacttgatgaagcgactggtaaattgcttgacaatgacaagtctccatcacgtcgtacaggcgaacttgacaaccgtggcagtcacttctacttgtcactttactgggcagaagcacttgctgcacagaacgaagatgctgagttgaaagctaaatttgctccacttgcaaaagcattagctgaaaacgaacagaagatcgttgctgagcttgctcaagtacaaggtaaaccagctgatatcggtggttactatgcagttgacccagcgaaagtaagcgctgtaatgcgtccaagtgctacatttaatgcagcgctttcaactgttcaggcttaattactaattcattagtacatagctaaaagccggtgcataagcaccggctttttatttttataaaataaaagtcattaaaaaaagcccactaacgtgagctttaaaacttaaatatttttatcggctattgcggctacgaccacgtggtgctttggtatttggacgcgttgtaccgttagtcttacgacgcggtttttcactttcatccatttgccaaatacgctttgtaccagatttttttgcagaaccatctttgttcttgcgaaccattggcttaccgccagtgccacctggttttttcacatatgaacgtgaacgataaggttgttcagccggaacatctttaaagtctgggtagagtagaggctcaatttctttggtttcgcccggttgtaatcccaattgaactaagtcaatcgtaccaatttttgtacgaatgagacgtaaagtcggaaaacctaccgcagaggtcatgcgacggacttggcggttacgaccttcacaaatagagatttcaatccaagatgttggaatgctggcacggtaacgtacaggaggatcgcggtcccataaccattcaggctcacttaccttaattgctttagctggtaaagtcataccatcattaagctctacacccttacgaagctgctcgagtgcttcttctgttacatcgccatcaacttgaactaaatacgttttgtattttttattcgcagggttggtaatgaactgattcaaaccaccatgatcagttaagaaaactaaaccctcagagtccatatcaagacggcctgctatgcgcaaagtcgggtcatctacaaagtcagagaccgtcatgtgtgcttcgtctttacgaaactgggagagaacgtcatatggtttgttgagaatgacgattttcataaaaaatgacttcttctttcaaataagcggtaaaaacattgagctatatttaagtgcgaaatttgcttatttcccacataaatctcaaaaagggttaaattcgattaagctattatgcgttaataaaagttgaaagtattgtttatcgataattatttttgtttggttagttaaatattataaaagggagaatctacataatgggttatcagaagatcgtggttcctgccgacggtgataaaattacagtaaaagcagacctgtcactgaatgtaccaaatcatccaattattcctttcattgagggtgacggtattggtgtagatattacaccggcaatgaaaaaagttgttgatgcggcaattttaaaagcctatggcggcaaacgctctattgaatggatggaagtgtattgcggtgaaaaggccaataaaatttacggtacttatatgccggaagaaacctttgaagcgctgcgtgaatttgtagtttcaattaaaggccctttaactacaccagtcggtggtggcattcgttcacttaatgttgcactacgccaagaactggatttgtatgtatgtgtgcgtcctgtgcgttggttccaaggcgtcccttcacctgttcaacatcctgagttaactgacatggtgattttccgtgaaaactcggaagatatttatgcaggtattgaatggaaagcagattctgaagaagctaaaaaagttattaaattccttcaagaagaaatgggggtcacaaaaattcgtttccctgaaggatgtggtattggtattaaacccgtttccaaagaaggaacacagcgcttagttcgtaaggccattcagtttgcaatcgataatgacaaaccttcggtgactcttgttcataaaggcaacattatgaaatataccgaaggtgcctttaaagaatgggggtatgagttagcgctagatcgtttcggtggtgaattaatcgatggtggcccatgggttaaaattaagaatcctaaaaatggtaaagacatcattattaaagacgtgattgcagatgctttcttgcaacaaatcttgatgcgtcctgctgactactctgtaattgcaacccttaatttaaatggtgactatatttcagatgctttagcagcagaagtagggggaatcgggattgcgccaggtgcgaatattggtggagctattgcagtgtatgaagcaacgcatggcactgcacctaaatatgctgggcaagataaagtcaacccgggttcaattattctctctgctgaaatgatgctccgtgatatggggtggacagaagcagcggacctgattattaaaggtatttcaggagcgattgcagctaaaaccgtaacttacgattttgagcgtttaatgccgggagcgaccttgttacgttgctcagaatttggcgatgccataattcagcacatggaagattaaactttcatagaaaagccctcaattgagggcttttaaagtctttagatttataatattgaaaaataataaaaaataagaatttaaaacgttaaaattttagctaggaattagccgtatatgcccacaatatacatgctaatatcgttaaactcagtaatattaagccttgcccatgatgtgttgcatacagtggtacatttccaatggtatgcgtcattttgtagtttagaataggccgaatacaaaagaaaaaaagcggtaatgataaaatcactgtattactaattttaattgtatggcgaaaatagtaactaaatagtcctattagggcggcatacaataatgttttaaatagcacctctccactggtgtatatatctataccgagataaaaattaaacttccatatcagaagactaactgtagcaattattgcgataatacctacaacaacggcatttgctgggtttgatacattgaacatttttagagtttttaattgatataaattaatttgcttaaaatatatattataaaaacatagagtacagtgacgatttttaactttataaaactccctaaaaatcctcatttagacattttgagactcaagcgagtttgagcttgtttctttaaatacccatagggcaaaacaaaatatgatcacgatgagtagccctaaactttgaccatgacccgagagataaaacggaacatctgggatagtttgaatggctttgtagtcaagaattggctctagccaaaagtatgcaaatggaacagcaattaaaaattgtgttgtaaactcaatatgattgcgtgttaaaaagcccaaaatagctgctgtgagaatatagataacaatccttaccgagacttcgtatgatgttgtcatatctagtgcaaagatggtctgacacttaaatgccagtaataaaacaccgataaaagcgaacatcgccaagagctttaaaagctcatcaatataattgttattgctcatgttttgctcaattttaagtattaaaaattataaattttgactgaatatagatcagaaaatagctctctacattgacataatatgacattttttgtcagttaagtattttaataaggctactaaaatagttgttatgcggtttgttctactgatctattcattaatttttattttgacaatatacgactactcaatggaaaagcccctgatatatcggggcattttttattgcataaattccggatgcttctggggcttagagataccaattttcttttgatagctttggtctaaagcctgaataatgagtacgaaaataatcaaaaagagaggaaagaataaagttttcacgatttggtttctccgagagtgttcggcggggaagaacggataggaattaaaaggctcaatgcaaataacaaaacaatgccgcccattaaaaacagatgggcataagaccaatgcaagtgatgtaaagtactaataacaacgccacctaataactgagtgctggcaaacccaatggtggcaaggctccagattttttgataacgctgttcataaatctgtagcaggctgtaagagctaataaatacggtggcaggtgtgagtaaacctgtaagaaaggacgataaagtgagcaaagcagtagcatgtgaaaaaaatggtagggcaactgccaagcaatagacaccgtatagacatttaattgcctgcaaatatccaataaggcggcttaaacaatacgccacaaaggcgccaacacaacttccgaccccataaagaacccaaaataagtttcgttgttgcaatggaaaatgtagggtccccgataaatagtccatccaaaacaaagagtgagggatatatgcaaaagcactgcacatataagcaataataatgaccagtcctaaacgtgaatgtatgaagttttgaggagcgtgattggccgtttgaacggactcggtaggtgggtgccttaataactgtaaaagtaccaaactgccaataatggaaatgacggcaaaaatttcccagacatattgaacaggcatatttttaagtgcaggaataatgagagtggcagataacacgcctgcgccaataccactaaaccctaaaaaattgactttgagcctttggctaattgcaatatttttcatggcaaagctgggcgctaaaatcatgagtaggccacctgcgatacctgaaatggtgcgccagagaataaaccaagccagagacatgtgtataaacgaacagcagagtaggcttaagctgcctaaaaccgccgaagtcataatcaaagcaggtatagatttttctttaatgctaaacagggccaatagtgcgccaaccagatagcccaataaatttgcacttcctaagtagcttgcaaagtcgtgagtccatccatattgcacaatcataataggcatgagtgcggtataggaaaatctaaaaataccaattcctaggcaagtcgctaaaaagacaagcaggctcattcgatagaacgtagacatgagaaatctctcaatttttttattattaaaagcgagtttatttatcattagaaataatttaatatgatattaattatcttgttttgagatagtggcatgttgcttaagtctttagagttttttttagcggttgcagagagtggaagtttttcattggctgcacaaaaaatgtgtacggttcaatccaatatcacgagccacgtgaaaaagcttgaagaagagttaggtgtgattttattaaatcgtcataaccccgttacattaaccaatgcaggacaccagctacatagttatgctgtgcaaatgatcgcactgcataataaagcgaagacaatcttccgagaaggtgatattgacccgaatgaaactattcgtttgggcagtatggaaacgacagcagcaatacgacttcctcaattgcttaatgaatgtatgcagcaacatccgaatctgccgcttgaacttcaaactcacccgacaggatatttgttaaatgctgtgcaacaaggagaagtcgattgtgcttttgtcgcttctaaatatgtgattccagagctatatagttttccggtgtggcaagaacaactggttttggtttgcccaaaacaacaaattgattttcccgacattgccaccctcgcaaagactcgttttattgcatttcgacaaggatgttcctatcggcatgcaattgagttgtttttaaatgatcacagtgtgccaccttcgcaaattatggaaatgggcagtctggatggcattgtaagctgtgtggaattaggtgtcggttttgctttattgccaaagtcatatctgaataaagtagccgataaagtctcattaagttgttttgaaattaacactgaatctgcacatttcactacttatttggtcgctcagcctcctgaaacatggggcagtaatctaaagcaatttatttgttttattgagcaacaatttatacagaaatgcgcttaatttttatacataaatatctaacgtaacttatgttttaaaagtgatatatatgtatttaaaagtcattttatattctcattcagatcggtaatgatctgcatgctagaaaattgttgaaaagggtagtttatataggccggctatggtcaaatatgcccccttaaaagatgacacaagtaataatttggagtttgggaatgaatatacccttaatcatcaatattgtggtttttgtcgggttaatatttttactcgcccaaacacgtaaaacggactggagcttatctaaaaaagttctagctggcttaattttaggtgtagtgtttggtttaggactacatttgatttatggcggtggccatccgattcttgctgaatctattagctggtttaatattgttggtaacggctatgtaaaacttttacaaatggtcgtgatgcctttggtctttgtttcgattttaggtgcagtagcgaagctacaccaagcctcttctttaggaaaaatcagcttctacaccatcgggactttgttatttaccacactcatcgctgcgctggttggggtatttgtgacgaacttgtttggtttaactgccaaaggtttggtacaaggggcggctgaaacagctcgacttactgcaattcagactgactatgtgggtaaagtaacagacttaagtgtaccgcaatttattctttcttttatcccgagtaacccttttgctgagttaacgggtgcaaatccgacttcaattattagcgtggttatctttgctgtctttttagggatagcagcactcaacctaatgaaagatgacgcagaaaaaggtcaacgtattctgacggctattcagacattacagtcttgggtaatgaagcttgttcgtttagtgatgacgcttacaccatatggtgtttttgccctcatgacgaaagttgtggcaagttcaaatgtcgcagatatcttgaacctaggcggtttcttggtggcgtcttatttaggtttggcgattatgttcgtcgtgcatgctattattttgactctgaccggtgtttctccacttaagttcttcaagaaagttgctccagttctaacattcgcgtttacgagtcgttcaagtgctgcaagtattccacttagcattgaggcgcaaactcgtcgtttgggcgtgcctgagtctattgcaagtttctctgcttcttttggtgccactattggacaaaatggttgtgcgggtttatatccagccatgctcgcagtcatggttgcgccaactatgggtattaacaccctagacccaatgtggattgcttcgttagtgggtattgtgactttaagttcaattggcgtagccggcgttggtggtggtgcaactttcgcagcattgatcgtacttcctgctatgggcttacctgtaacattggttgctcttcttatttcaattgaaccactcattgatatgggacgtactgcgttaaacgtaaatggttcgatgactgctggtgtagttacaagccaatttatggggcagaccgacaaagctataatgaatagcgaagatgaaattgaattaactcaacatcattaagagttaatattaaacggctctccactctggatgagccgtttttttatatgtgtaacttgcaactgtgatgttaatttttaaaaaactgtatctatttttcttttaaataattttcgaaaatgagcctattaagaaagagagcactaacatgaaaatgtatcaagtcgatgcttttaccaaagagctatttcgtggaaatccggctgctgtgattattggaaaagagtggccaaatgcagatttaatgcaaaagatagcacttgaaaataacttatctgagactgcttttgtaaaaattatagactctgaaaattatgaaatacgctggtttactccaacggttgaggtggatttttgtgggcatgcgactcttgcgagtgctttcgtattatttaaagattttactgagaaaaagactcttaattttcatgtacgaaacttaggtttgtttgtagttcatcaagatgaagacggcaaaatcagaatggattttccaattcgtaaagctcagcaagttgaagattatccggctattttacgtcaagcattaacaaaaccttttaaagcggtttatcaaaatgttcaagcctacattgttgaatatgagtcagtgcaagatgtgttagatgagcaacctgacatgaacttacttaaagccttaggtaagcggactgcaattacaactacagcaatggattttgcaatcacctcaaaagctgacgatcaatatgactgtgtttctcgttattttgcacctgtcgcaggcattgatgaagacccggttactggttcaattcataccgcaatagcgccactatgggcagagaaactcgctaaaaataatattgtggcctatcaggcttctagccgtggaggcgtattgtattgtaatgtcttaaatcaggaacgtattgaaatttcgggatatggcaaactttatatgcaagccgaaatttttccttaaaatataaggccgtttaaataaacggcttttttttcaaatctttactatgaaagtcagctcaaatttcctactatagtcacacaactattgattttttattattcaaattaattggtatttatatgtttatgcagtttaaacaactgactctctccctatgtatttttggtttaagtgctgcctcttttgcacaaacaacattagtaaaaagtaagcaaaatgttgaggaatataaattagataatggttttcgggtagtgcttgcgccgaatgacaaagaaaataaaatctttattaataccatttatttaacgggttctttaaatgatccacagggtaaaagtggtttagcacatttactcgaacatttagcatttaaaggcacgcaaaatgtaaaaggtgaagaattccaacgccgtttagatcaatatacgttaatgacgaatgcgagcacggattactattcaaccaaatacaccaatattgtccgtccagaaaaaacagcactcgatcaagtgctgtaccttgaatctgagcgcatggacaaattagttctacaagaaaaatttgtgccttctgaaattgaaatcgtaaagcgtgaacgtgaagtccgtatggatcagccttttgctgtcttgatggatcaaatgtggaagtcggcttatggtaatcaatatctaggtcgattaccgattggtgatttacctgagcttaagtcaattaaaatgcctgagttgaaccagttctatcgcagttggtatgcgcctaataatgcggtcatggtgatttcaggcaagtttgataaaactgatgttttgaaaacgatagaccaatattttagcccaattcctgcgcgagctgtgcctaagcctgttcaagtgcctgtgttagattctacaaaactcaaaaaccgtgagtttgtggtgaaaaagggtagtgatttggccaaattccatatctatatggatggtaaaaacacaaaaattcaaccggaactggctttcgcacctatgttgtataccatgcagccaagtggtcatttgtaccaaaatatggttgaaacaggtgttagtacagacgttcaggcatcaacatggctagatcaagattttaacgtcgtatttttaggtgctatttattcaccaaaaaatgaccctaaaaaagttgaaagcgctttgctctctggaattgaaaagggtaaaccttttacagagactgagctaaatcgtgtaaaaagcttaatgaaaacgcaaggtgagttagtcaataaagatgccgttgctttgggttcccgtttaagtgattacactgtagcggatgggcaatgggaccaatatttcaaagatttagattcaattgataaagtgaagctcaacgaggtaaatcaaaccttaaaacagttccttgttgcaggtcatcgtattgatggcgatattttgccaacaccagaagaccaaaagaaagcattacaactcgacgcaaaagataagcctaaaacattagatcaaacagatgttaaagcagagcctttaaaagatccgaaagtttatcaacaagaagttgccgagtttttaaaaacgtctaagcaatatgccgaaagtaatgagaaaaagatccttcgcggaaaacttaaaaatggaatgaagtatgctttattccctgtagaaacccgtgatgatcgtacctatgccaccattactatggattttggtactgaaaaatctttattcgataaaggtacggttgttgatttaacttcatatttattgcttcgcggttctgataaatatagcttgcaagatattgccgataaatcgattgatgcaggtggcgcagcttatgcaagtgccgatggcaatggtatgaccattaatattcaatctaaaactgaaaagttcgatgagtttttcaagtttgttctagaggtcatgaaaaatcctaaatttgaacaatctcaatttgacttaattaaatctcaaagcttatctagtcttgatcgtccttataccgaaccggatgtggtagcaggtctaacattatctcgcttggtagaagaataccagccgggtgatttgcgttatcactttgaaccggagctggctaaaaaacaattaaagaatgtgactcaagagcaagtcaaagagctttatcagcatttctttgccatgaatcatgcgcaaattgcgattacaggtgcatttgatacccaaaaaatgaaaaagctattgaatcaagagttcggaagctggaatagcaaacaaccgtatgaaaaaatcttgattcaacatgttgattttcctgcccagcaagtacatgtcttatctgagcagcgtgagtttggtagttatcaaagtgtacttgcattaccggttgggaaaaatcatcccgacgcttctgcattaattttaatgaattacattttgggtgaatctcaaatttcatcacgtttggctcaagagcttcgtgaaaaaaatgcattggtatatggttttggtactggtttgcaattagatcgagacacgaatgtaggtgcgttaagcattagtgcaaattatacggctggtcgctcagcacaagtttctgcttcagttcataaggttctaaatgacttaattactcatggtattacagagcaggagcttgcagcagcgaaggcggatattatgaagaaacgtgttactgccttagaagatgaacgtaatatccacggtatgttaaatctagagcttgagtcaggtaaaacattacttgaccgtgttaaacatgaccaagagttaacaaagttaacggttgctgatgtgaacgcagttattaaaaaatatattaaaccttcaaatcttgttgaagttatggctgaccagtatggtcaagcacaaaagcagtaaataattgccaaataaaaagccacttcatgtggctttttatttgagtggtaaaatattttaatggtcgtgtttgtgagtatgaaaatcttcattcttacggaaacgtaagtagttatcgaactgttcacaatactcatcaaagttatcttcaagcatcatttggaactgttgaagaagataagacatcacctgatcttttgcatcacgcatttcattaccatctttaaaattattggcagccacccatgtattaaaacgagcagttgcaaataacatggctgcgctcacttgaccacgaagctcggccgggtctggcttttggccttttggcgggcgacaaaaatcatttgcttgtttaatgaattcatccgcacgctcaaagaaaacagcatttaacgcttcttcttcagtaatatctgttgcattaatcttttgagacatgacttattcccgcaaaaatagagctgcttattataggcaaagccttgcggaaacaaaacctttgccttagtctgtaaatagcctaagtattgggagttataatatgcaagatgcaatagccgttcaaagtctaaaaacagacattgctttattacgccagcatatttttccaccccaatatttggagcatgtagaagggctgccaatttattatggtttgcaagaagaagttgtggcctattatcagcaatggaaagatttaatagaaagggcacaagagctttttcaaccttttatggaagatgaattaccagatgcaattcatttaccaagccatctaaacttacccttattctttttccatgtagaccgaattcggattaataaaacacgcgcaaaagaatcaaaaactttccgtggtgtggccagtcttattgaaaaatgtgggcagtttgaaacagatcagatatttaccatgcaagaatggttgcaaagtgatgatacagcagcgctagttgcacaccgtgaatttattgatttacggacgtatgtattccagcatggtcaaagtgaatatacgcgttcacggttttataccaatggtattgtgttaggggtagagctacactttaaactcgtcgatgctcgcgataaaccaagaaaacagcgtagtgatagctatagcgatccattagcagataacggtgtatggaaagtatttggtaaatatagataaaaagtcgcggcatatttgccgcgacttcaagattcttaccaaaatgtttttgcctgtttaaatttttgcaaagcttcggcagattgattttgtaaataaggttgtttggctttaacccatcctaatgcaaaccaaaaatgtgggtcgtgttcaaccgctttattaaatagatcttcggcaataaataagtcgttataaagtcctaaagtattttgcacaggctgtaattgttttaaaaactgctgaacatttttacgaggatataagctcgatataaactcaatgcagtaacgaagctgtttggctttcttgcgcgttctgtgctgttcggtgacttcaagttcagtgaaatgatcggcattactcaccacttgatggtgtaacttatctaagctttttcctatatattttttcaattttcctttggcgttttgatcgtcttcttctgaataggcaaatgctaataaggcgagtataagcttaatggtatctgcggatttaaacagtgtggcaagatcttttaatggctgttcagagatcggaagtaaaagctcaggtgaaccatgctgcacaatcataggtaaaatttcggtacgaatagcatcttcgtctcgcgtgtccccaagctgacggaatagttcggcaatttgctcttcccacacagggtttaactcgtctgaccatgctgaaaaatgttttagtgcactacgtaaacggcgtaagcttacgcgtgcctgatgaatgtgctcagcctcggcaactccatcggcaattgcggccatgttaggcaagaattgtcccaaacagttttctacaatctttttgagtgcctgttctgctgaaatgtttttatctaagttcagtttttttgcgtgaacagccggtgaagcagcttgccccaatgcgagtaaattaccgcgctcggctttacttctaacatcgagccaaagttcataacgattaatccattgctgagcaaattgaatcagtgttttgactgcaccttgtttaagttcgaactcaacttcgcaaattttgctttgtgctgttgctgtttttacggcgccgtcatcaagacagacttcaattgccgtgtcatctgcttcaaaaacatgataggtacgttgtacatcagtctcaaactgtaagcttagcttttcgacttcagagcctaaagcttgagtaatcaaatctgtgacggctttattgtctttatataactcaaggtttaagtcaggttcttgatcgcattttcctaaaaaaacttcttcttcgacacgatgtaaatgactttggccggcagccttaaaggtttgtacccacagatcattttctttacgtaagcgtaaggccataccattttttgcaagtaggcggtctggcgtatcgtaatacttggcctgtaaatgaatatactgtgctttatgtttttttaaatattgctggacggtttttttcttcgattcaggtaactgaaacttaagctcaacttcaaccataacagatctccctgaatcaggtatttaaactatcttgaataagtataatagcttagcgctaaaaataatgtttttgatagagaaagttacaatcaaacatatgacgctacacttttatttaggtgtacaatcaggtgatgttttgatcaaataaaaatcaggaagatgatcgtgaatgcacccgtaaattttaatcatgaaactcagccagagtttgaattacctattaaaaactatcaggaattttatcgtttttatttaactgaacaccgtaatattatgagtaggcgcttacatgcggtgggcagtagcattggtctatactttttttcaaaagctattcgtaagaaacaggccaaatacgcactctatggtttagtttctggctatgcatgtgcatgggttggacattttatgtttgagaaaaataaacctgccagttttaaacagccactttatagctttatttctgattggcgaatgctctctgatgttgcgactggtcgattaagtttaattgatcgcaagcacgataaaattccaagttaatttttatttctatttttaatataccgattggtactgataagcctatatcaatcggtacttatgatgacttataaatccgttatactagcgaagtttttaaaaagcgagagtagagtatgcgcggtttatacctcattaccaatgatgacccaatccaattattattagaaaaattagacgccgcactcgcaacccgtcaaatcgcaattttacagtaccgccgtaaaaaaatagacaaagccgaacagcctgctgaagttgaacagatcaaacaattatgtgaaaaatatcaggttccttttgtcattaatgatgacctaaaactggctgctcagtttggtttaggtgtgcatttaggccaaagtgacggtgaaattaccgatgcaaaatcgcagttaccagaaggtgtcattattggccgtacttgcttaaactctttagagcttgctcaaaaagcaattgccgatggcgcaacttatgttgcctttggtgcggtttatgcaactgccactaaaccggaagctggcaatgtaggtatagaagtgattaagcaagcagcagctcaatatgatttacctatttgtgcaattggtggtttgactgttgaaaattcaaaacccgtgattgaggctggagctgacctctgtgcagtcattagtgatatattaggtcgatcaactgctgaaattcctgcccgtgtacaagcgtgggcacaattattttcttaagctttcaaaattattttttagatatttaagacgagcatttccatgagtttatctccaaagcaagaacagttatttaaacaagccagcaaacacattccaggtggtgtgaactctccagtacgtgcctttaatggcgttggaggcacaccggttttcattgagaaagccaaaggtgcgtatttgtgggatgtagatggtaagcgctatgtagattatgttggctcttggggaccaatgattttgggccatgctcatccggatattattaaggctgtgcaaacagcagcagaagatggcttaagttttggtgcaccaaccgtacatgaaacaacattggcagatatcatttgtgaaatcatgccatctattgaattggtacgtatgaccaactctggtacagaagcgactatgactgctattcgtttagcacgtggttatactggccgtgacaagatcgtgaagtttgaaggttgttaccacggacactctgactcattgttagtaaaagcaggttctggtttattaactaaaggtgagggcgaaccaacatcaaaaggtgtaccagctgatttcgctaaacacactttaacactgccatataacgatgttgcagcattaaaagaatgctttgctaaatttggtcatgaaattgcaggcgtcattattgaacctgtcgcaggtaatatgaatatggtgaaaccaattgatggtttcttacaagcgattcgtgatgtgtgtgatgaatacaaatctgtatttattattgacgaagtaatgacaggtttccgtgttgcattaggcggtgctcagtcagtttataacgttaaacctgacttaacgactttaggtaaaattattggtgctggtttacctgtaggtgcctttggcggtaagcgtgaaatcatggagtgcatcgcacctttagggggtgtataccaagcggggactttatctggtaatccacttgctatgcgcgctggtatcgaaatgtttaaacatttacgtcaaccggacttttacagcaagttatctgctcaacttgaaaagttacttgcaggtttacaagcagcagcagatgaagcgggtattccatttaaaactcagcaagctggcgcaatgtttgggctttactttactgaccaagaagacatcacaagctttgactctatgttggcatgtgatattgaagctttcaaaaagttcttccatggcatgttaaaacgtggcgtaaacttggcaccgtcagcatttgaagcaggctttatttcatctgctcattctgatgaagatatcgaatttaccattcaggctgcaaaagaaacctttgccgaaatgaagtaagcaaaaaggcccgttttaaacgggctttttaatttgagctattttatatttgtagagaacaatgttttatcccttacctcgaaaaatccagttagccgcaagtacttcaaattggcctattgaatctacgcaaagcatattgctcctagtcgggctagatgatcttgaaaatatatctgattgggcgcatcagccattagccgatcatttagaaatactaagtaaaagagcacaagcactcgaaattccggtcatgatgattcagtcatctcaacttcaacaggccatgttacagcttgggcagcacttgtcatcaaacactcaggcacaggtaattatggcggggaatttatcaccgctatttaagcaaatcatgcagcttgttttatccattaccgattatgtagctattgtaaatgatgcaatattggcgagtagtttagagcagcatatacaatggattgaaaaaataagttttgaccatattcaacatataaacacgcagactttaatgcgcttatggtctttaagtgcaccgtcattacaggtcttgtccgataaaggaattttattggcagttgctgaacagatagggcgacatccaatggaaattcatcccgaaatagatttaagaaactatggtctagacgcttcgggagtcaattatttggtggaattatggcgtgctaatggtgcgagcctaactgttgatgagttgatgcaaactcctacattgcaacatattatgcagttattgaagctctaatcggctttagccgtaatgtgattcataatatttgcaaattctgtcgttaatttacccgaacggcattgtaattcggacgtaagctttttattattgcccgcttgtttttcatcttgccttgggaatacaactttgagtgattttctaagtgaacatctgatctatcgtgatgatgattttatggtgattcataaaccttcggacatcttgagtgtgccagggaaaggtgatttacatgacagcgttttgacaagactggtggcaattgaaccacgaactttgctcattcaccgccttgaccgtgatacttcgggtattttggtttttgggttatctaagcgtggacagagtgcgattgcacgccaatttcaagaccgtcaaacttcgaaaatatatgaagcgctagttgctggtcatttagagggtgaagggacagtggatatccctgtcgtctatgatccgagtcgaccacctttacatattgtcgatgcttctcataacaaacctgctttaacacattggcaggcgattgaacatttccagattcagggacaaccggttacgcgtgtcaaattaacaccgattaccggacgttctcatcaactccgtgtacacatgcaatatctgggacatccgattgtaggtgatacattgtatgcagcaccggaacaattacttgttcctcgtctgtgcttgcatgctaaacagttaagctttaatcatcctgtcacaggggaatcattaacttttaactgtcctgtaccgttttaatgtaaaaactttcaatgagtaatttttgtagcgaaacaatttaattggtttctgctgcaaaattttgctttaaagactacataaaaagatgcaaaaataagctactttgcatcgtacaatatgtagtgcgaacttgagaaaaaggtggaaaaattgcagcagtatgctattggtcaacgttggctatcagatacagagactgagctcggtttaggcgttcttattgatgtagatgaaagatctgtcagcattttattccccaagagcgatgaaacgcgtgtttatgcacgcaataatgcaccgctttctcgtatcatctttaatgtaaatgatgaagttcaagaccaagaaggcaataagtggaatgtcgagtctattgaagaccgtcatggtgttttgcgttataacgtggttcgtactttagaaaatggcgagcaagaacgtaaagcgctaaacgaaacgcgtattggtgcacaaattcaattatcaaaacctttagatcgtttgctggcaagccagattgattataaagagtggtatgacctacgcattgaagcaatgctgatgcaggcgcaaatgcaaaccagcccattacgcggcttggttggggctcgtgtaggtttaattccgcatcagctttatattgcacatgaagtcggtaaacgtttcgcaccacgtgttttacttgctgatgaagtaggtttaggtaaaacaattgaagctggtttaattatccaccaacagcttaaaaccggccgttctgaacgtatcctgattttagtccctgattctcttcagtatcagtggatgattgaaatgcgacgccgtttcaatttgcaattttctctgtttgatttaacccgtactgcatctatcaaagaacatgatccagaacttaacccgttcttaactgagcaatgcattattgccagcgtcgacttgatggtggaccatgacgatttgcgtgagcaagcattagaagctggtttcgatttactcgtcgtcgatgaagcacatcacttgatgtggagcgaagaagagggtggtaacgatcgttacgacttggttgaagagcttgctgaaaatacggcaggtgtattgttgcttactgcaacgcctgaacagctgggtgtagaaagccactttgcgcgcttacgtttgttagatccacagcgctttagtagtttagagcgtttcttggatgaagaagctcaatatcagcaaactgcgcaaattgcagaagtgcttatgtcggatgagcctttaactcaagagcatttatctgctttagaaggtttgttaggtcattcaattgaagaccaacctgagcaacgtttcagagcgattcatgagttgttagaccgtcacggtacaggtcgtattttattccgtaatacgcgtgaagcgattcaaggcttccccggccgtgattgccaacctgcgcctttacctgcgccagcagattggtcaaaagacggtaaattacgcgagcaaatgtggccagaagaagcacaaattgatggctcatggatgcaaaatgatccgcgtgtaccgtggttaatggaaattctacgtaaagaacttaagcataaaaaagttcttttaattgcccgtagtggtcctgttgtcgagtctttagaaagtgcgcttcgtttgcatgcaggtattcgtacagctatgttccatgaaggtatgagtttgcttgagcgtgaccaagcggctgcttactttgcagaagaaagctacggtgctcaaatcttactttgttcagaaattggttcagaaggccgtaacttccagtttgcgagtgatttaattttatttgatttgcctgcaaaccctgacgttttagaacaacgtattggtcgtttagaccgtattggtcaagaaaaccgtatccagattcatgtaccttacttaatgggcaccgctcaagagcgtatgttccgttggtataatgaagcattgaatattttcagcaatatttctccaacagctcaaacgctacaagaaaactttattgttgaattaaaagattgcttgcttgccgaccaaggtcaaacatttgaagatttacttgaagaagttaatgttcaacgccaagctttagaagcagagttacaagctggtcgagatcgtctgcttgagtacaactcatgccgtcctatcgttgcacaagaaattgttcaagcgttagaagactatgatgacaacacaacgctgcctatgtttgtgaagcgtttcatgtcttcaactaatattgactttgatgagcaaagtaacggtacagtcattattcgtccaactgaccagatgcaagtgcaaggtttggcattagacgaagaaggtatgactgcgactttctatcgtgatcaagcgcaaatgcgtgaagacgctcagtatctaactttagaacatccgtttattgaaagtgtcatggaaatgatccgcacacaatcatttggtagtaccaatgttgctgtgcttaagtccaatgcattaaagcaaggttcggttttacttgaagtctggtttaaagttgatgtggtggcaccaaaatccttgaacttgccatcaagcttaccaaaacaacttattcgcgtattgttaagtgaaaatggtcaggacttatctgaaaagattgatccaaccattttaaaaccgtatttgcatcatttagatggcaatagctgccgccaagtggttaaagcccgccgtgaagtgattgaagagcgttataaacaagcgcttgatattgctaaagaaggtttacctcagcttcaacagcaagcaaaagagcattatggtaataaatggcaatatgagattgatcgtttaacttacttaaaacagttcaacccgagcattcgccaagacgaaattgagcgcttacagaagttgcaaaaagaaggtttaagcttgcttgatggcttaaccgtaacccctgaagcgattcaagtgcttgtagtagtcaaaccataagcaatgagtaataaaaaaagcgccacacaggcgcttttttattgagtaaatttaagttaaatcaatctggcatcttttaattctagttttaaataagcatagaaaatcggtgctgcaattaagccacttaagccaaagattgactcgaaaattaacatagccaataaaatttcccatgcattggcattaattttatgaccaataattttggcattaataaagtattctaacttgtgaactaatacgaggtagagtagcgcaacacctgctagaccgagtgaaattgtaagagccgcaataaaagttaaagtatttgaaattaaattccctaaaattggaattaagccaaacataaaggtaagaatggttaaggttttggcgaaaggtaggtgaacaccccagatcggcaatagtacaaaagcaaataatataaagagcagcgtattaatcgctgaaattttaatttgtgcaaaaactacatttctaaaagaaattgataatttttgaatacgttgaatcagtaacgatttgaaaacaggttggggtgtacgtcggtgaaagccgtgaatagcaaccaatataccgataataagacccatcaccatagtcactagattatgcaaaatatcggaactggcattttttaatgtagttacgttatctttcataaacgcgaatatttcatctttcagttctgtaacgctatctggaatatagcccggtaaatatttcccaatctccgcttgtaagtgcagtagtgtttggtcgactttaccgttaatactatgtaaaccgactccttttaaatcatatactacaaagctaattaaacttgtaatgaaaaaggcaagaagagaaatagtaataatacttaataaaatactaataaaaatgcgggctctttgaccatcaatataacgttcaacaatagagcttaaactaataataatttcataaatgagaaagcctgcaaaaaaacttgctaagagatgcagggggataaccgaaagcaaaaaaatgcccatcagaatatagcttgcaatcaggctttgacgattactcaaactttgcatgtgaatccctgaataacgtggggaagtattgatatgtattgctagaattatttacttatactcttgcatctaagctgcttcaatccatggtttatatttttattaatcagtaggcacaggtgtataaaaaatggcttgtaaaatcacaaaccattttatgtggaatctatcttatttttgcttcgtctagatgacgggcaccttctaaaatcatccggatcatgatcattgtttgttctgcgacttcagcacgctgatcaataggaaggtcaatcactttggcacccatgtgaaaaacaagttgtgtaattgcttttgcaacaagttcagggtggtatagatgattgttattgaggcgttctaagcgaattaaatcttcttgtagctcttgctgaaagaagttgagctgtcgatctacagcagctttataagaagcggaacctgtaaaaccttctcgcaacaataaacttaaattaccttcatcagcatccagctgttgcagaaaaatttctacagaactacgaataatgctgtcttgcaaagatgcacgaaggcgagcttgacgaataattttacgtaaaacgataccggcacggtcaatgagtgaaatagctaactcatcaatatctttaaagtgacgataaaaactgtttggggcaataccagcttctcttgcaacttctcgtaagctgagtgaggcaatacttttttgtggaccaatcaggttaagagctgcctgaaaaagttcttctttcgtaatcgtcgcttttcttccaacagaacgcgttactgtttttatttcaatgacatcttgtgatgaggttgtgtcatttgggctctgagaaagtgaggtttgggtcatgtttttcaatatattcttaaactgtctggattatagcgttagacagggaacttgtgaaattgtaattaaaagtacgagtgtatatacaaatatatatacatgtgtataataattaaaaaagagcgacagagccctcagttatgcaagcaatcgaaaagagaaattctctattcaattcattaacacaagctgtatttgacaaaaatatggcgaacttctggctacaaaaaataaatcctttatggtctgtgcagcatggactagttcaaattgtaaaaaaagaattcgtagctcatgacactgtgagcctgacattaaaatgcaaccgcttagtgaaaatgggcgcggcaggtcaacatcatccagtgattgttgaaattgcgggccgtcgctatgaacgtacttatagcttgacgcaaattgatgcagagcacttacgtttaacagttaaaaaagttgctgatggtattgtcagtaactggtttattgcagaaagcaaaattggtgatgtttttgagcttgggcagccttatggcgacatgcaacaaaacattcagacaccgaaattaattatgttagctgctggtagtggtattacaccaatgttgagcttaatcacagcaattaagcaaagccaacagttagaaaaaacgcaggttcagcttttatattgggtcaaacagcgttctgatgctgcttttacagagtactttgaacaagtggctgaacaaaacccaaactttagctatcaggtgttttacacacaagaaacaccaaatgatgaacgtttaaatgccgaacatcttgcactggttgatggtattgaaaacagcacagtttatgcatgtggtccatcgggttttgtttcaactgttgaacagctttttgaaaaagcaccaactgtacttacagaagcatttagtttaactaatgaaagttctgcggatgacattggttatgtgaatgtcacattaacccagtctaataaagtgattgcaattcctaaaggccaatccattttggtcagccttgagcatgaaggccttaagccgacacatggctgtcgtatgggaatttgtaataaatgtgtttgtagtaaaacgcaaggttctacacgtaatttactaaacggtagccaaaatacggaaccaagccaattacttaaaatttgtgtgaactcagcacaatccgatctagttattgatctttaagagagaactcttatgaatatgccagtgaaagtcgaatattttaaaaatcctaaaaatcgagatttgactccagcagaacttgaagcatttgcaaaagagcttgatcagatcaaacaagaagtattggatgatttgggtgaaaaagacgctaaatatatccgccgtgtctatgctgctattcgttatagtagctttttaggccgagcttgtttatttgcaggttggttcccgccagcgtggattttaggtacaggtttattaggtttctctaaaattatggagaacatggagctcggccataatgttatgcacggtcaatatgactggatgaatgacccgaaatttaatggtcaaacttatgaatgggatactgtaggtacctctgacaactggcgtcaaacccacaactataaacatcatacttataccaatattaaaggtattgatgatgacattggttatggcttacttcgcttattccctgaacaacgttggaagccagggttcttattgcagcctatttacagtattccattttgcttattgttccagtggggcgtagcaattcagaatcttgaaattgggcgtgtactttacaagcgtaaaactaaggcacaatttttagaagagttaaaaccggttaataaaaagattggcaagcaactctttaaagattatgttttcttcccacttattgcagggccggcagcactaccagtatttacaggtaacttggtcgcaaatggccttcgtaatatctggacctttagtattattttctgtggtcatttcacgaaagatgcagaagtgtttccaaaatctgttttacaagaagaaagccgtggacactggtatatgcgccaaattcgtggttcttctaacttaacaggttcagaagcattccatattttgtctggtcacttaagtcatcaaattgaacatcacttattcccagatattcctgctcgtcgttatcgtcaaatggctccaaaagttgaggcggtttgtaagaaatatggcttgaactataacaatgcaagctttgttaagcagtttggacaagtggttgggcgtattgtgaaatatgcgttcccatttaaaaaataagataaaagagccctgagaattcagggctttttttatttctttttagaaatccacatggtaattgtggcatgaaatactttatctttgtgagtgtcgtaaatatctacgttgactaaatattctccagctttttcccagttataatcagcttccactggtgtagcaattgcaattaagtctgtttcagctttttttaaatattcaacagtcattccttttggaatccagcgatgggtagatgggacagtaacttctgtcattgttccacccgccagttcagccatattacacatcgcaatcgcatggactgttccaatgtggttaagcacagaacgcttcttcttaatagaaatttcgcaataattcggttttaactcaataaaaagaggggaaatactgccgaaataaggtgcttttaagcacagcatacgagagaaagtccacttgcctttaggaaaagcagttactttattccagagctctaatgtggttgccataatttgacttcctttaattttaaaaatacagaatattattctgtttaagaatatagttctgtttacaaatatgcgtcaagtcattcaaaatatctccgatgactggtcagagaatacaaaatggtatctgctcaaaatttattagaacgcttatatcctggaagaagagctgctttaaaacgacaaatattattagatgctttagattgttttttagagcagggcattgaaacgactagtattgaaatgattcgtgccaaatcagaaagtagcgttggggcgatttatcatcattttaaaaataaagagggtatagttgcggccttatttttttcagctttagatgatcaaacagctctgagagatgaatatttaaaacagtccaaaacattaaaagatgttgtagaagctctaatttatagttatgtggactgggtaagtgagcaaccggaatttgcaaaattcttaattactgcgcgttttaacattatagagggggaggaacagcaacaacttacacaaaaaaataagagtagaaaccaaaagatatttagcttgatttcaaactttgaagaatttaaagcatttagtttaattccacatgaacttttgctttcattagtgattggttctacagagagctattgtcgtgcgtggttatcacaacgtgtaaaagctgaccccaaagactatagagaaattctggcaaaagcagcttggaattcattacaggatttgcgtttagaacattaatagcgagcaataaaaaaaccgcatgaagaatgcggttttagattgaaaaatgaattatttaaactggattgaaccgtttgcatttacagtaattttagactcaccagcagccatatcttgagctggtgccgcttcagcagcagcgaacttagctaggctggcacgcattacaggttgaggaaaatagttattcgtgttcaggtttagagtgaccaaagaatattggcttttattccatgcttgagtcaacatttgcgcacgctgttgaaagtttttagacgcttctaccatcaattcattctcaacttttttacgttgctcatctgagacgctaaaattaatggattgagtttgaaagctttgttgtaactcattaattaattggctagcagctttaaaatctttactttctaaacgaatttccgcgcggccacgccattcttttaatttattactgtcattgtcataaattggataagtgctttgggcaccagtttccactttcacttgtgggtatttacgcgaagttgcgagtgcttggttcattaactggttaatttgatttgaaagctctgcaggctgcttattgcttttttcaatatataaagttgcatgcatttcatcgtttgaaacttggcgagaagcttctgcttgaacatttacaatattgtagtgaagggcattatcatcttgggcaaaaaccatagggctgagtaccgtaccaaggagaagagtagatattgctaaagtacgcataaatttatcctttaaaaattaatataaatttaatttttttcattaagaaatgttaaacataagttatgcataacttttgcagattttgtggggtatttgtaatatttaaatcaagttttttaatttttggtaagaataaaattctttaaaaataaaaaacttagaattaaagtgtttcaatgtaacttaaaaaatcacacgaatataaaaaaagaatattttctttaggttgtcacatagtatgatgataattcatcataactattgggataatacaatttttcaataagattagatgagtaaagtacacaaaagacgttttttttcttgcaaaattaggtatcatcgcgctcctagttacaagatataaaatatgtgtcttcgctagttctataaagcaccgagtcaaaggaccaaaagtcaccagacttatttctttctacccttatcagagatggtaatccgatatgagcgttacttctgtcaaccctgccactaatgctaccaacgaatattatttgactcgccaaagtcaaatggaatcgaatgttcgtagctatccacgtaaattaccgttagcgatagcgaaagcacaaggttgctgggttactgatgttgaaggtacacagtaccttgattgtttagctggggcaggtacattggctttaggtcataatcatcctgcggtgattcaaagtattcaagacacattggcaagtggtttgccattgcatactttagacttaaccacacctttaaaagatgcgtttactgaagcgttgttagcatatttaccaggtggtaaagaagaatattgcttacagttctgtggtccttctggtgcagatgcgactgaggcagcaattaaacttgctaaaacttacactggccgtagctcagtgatcagtttctctggtggttaccatggtatgactcatggttcacttgcaatgactggtaacttaagtgcaaaaaatgcagtgaatggcttaatgccaggcgtacaattcatgccatatccgcatgaatatcgctgcccacttggtttaggtggtgaagctggtgttgacgctttaacttactatttcgaaaactttattgaagatgttgaaagcggtgtaactaagccagctgctgttattcttgaagcaattcaaggtgaaggcggtgttgttacagctccagtaaaatggttgcaaaaaatccgtgaagtgactgaaaagcacaacatcgttttaattttagacgaagttcaagcaggctttgctcgttcaggaaaaatgtttgcatttgaacatgccggtattgaacctgatgtcgttgtaatgtctaaagcagtaggtggtggtttaccacttgcagtattaggtattaagcgtaaatttgatgcttggcagcctgctggtcacactggtactttccgtggtaaccaacttgctatgggtacaggtcttgttgtattagaaacgatcaaggaacaaaaccttgctcaaaatgcacaagagcgtggtgaattcttacaagctgaattgaaaaaattagctactgaattcccatgtatcggtaacgtacgtggccgcggtttaatgattggtgttgaaatcgttgacgagcgtaaacctgctgaccgtatcggttctcaccctgctgactctcagttagcggctgcgatccagactgcttgctttaacaacaagttattgcttgaaaaaggtggtcgtaacggtacagtaattcgtttactttgcccactcatcattactcaagaagagtgtgtagaagtaattgctcgctttaagaaagcagttgcagaagcattggttgcagtgcgaggcgcgtaagtatggtggattttgcagaacatcgtaaagcgttactctgcaatgatgcacaatccattgctgactatgagtcagcaatgggcgaagcggtaaaagccgtttcagcatggttgcaaaatgaaaaaatgtacacaggcggtagcattaaagagttgcgttcagcaatttctttccaaccttcaaaagaaggtatgggtgtacaacaatctcttcaacgtatgattgagcttttcttgaataaaagcttgaaagtacaccatccacactcattagcacatttacactgcccaaccatggtgatgagccagatcgcggaagtgttaatcaatgcaactaaccagtctatggactcatgggatcaaagcccggcaggttcattaatggaagttcagcttattgattggttgcgtcaaaaagtaggttatggttctggtcaggctggtgttttcacttctggcggtactcaatctaacttgatgggtgtgttacttgctcgtgactggtgcattgcgaaaaactggaaagacgaaaatggtaacccatggtctgtacagcgtgatggtattccagctgaagcaatgaaaaacgtcaaagtcatttgttctgaaaatgcgcatttctctgtgcaaaagaacatggcaatgatgggcatgggcttccagtcagttgtgactgttcctgtgaatgaaaatgcacagatggatgttgatgctcttgaaaaaacaatggcgcatcttcagtctgaaggtaaagttgttgcttgtgtcgttgcgacagcgggtacaactgatgctggtgcaattgatccattgaaaaaaatccgtgaaattactaataagtatggttcatggatgcatatcgatgctgcatggggcggtgcactgatcttgtcaaatgactatcgtgcaatgcttgatggtattgagttgtctgactcgattaccctcgacttccataagcattatttccaaagcattagctgtggcgcgttcttgttgaaagatgaagcgaactatcgtttcatgcactacgaagctgagtacttgaactctgcttatgatgaagagcatggcgtacctaaccttgtgtctaaatcattacaaacgactcgtcgttttgatgctttaaaattgtggatgaccattgaatcactcggcgaagagctatatggttcaatgattgaccatggtgtaaaactgactcgtgaagttgcagattacatcaaggcaactgatggtttagagcttttagttgaaccacaatttgcttcggtattgttccgtgttgttccggaaggttacccagttgagtttatcgatagcttgaaccaaaacgtagcagatgaattgtttgcacgtggtgaagcaaatatcggtgtaacaaaagttggtaatgtacagtcattgaagatgacaacattaagccctgtagtaactgtcgacaacgttaagaaccttttagctcaagtattggctgaagctgaacgcattaaagatgcgattgcttctggtaactacgtaccaccaatcgactaattgagttgataccccaaaaagctcggtttattgccgggcttttttattacatattatttttattaaaagtgtgtatcagaagaagggtatatgcacaaaacatgcatattttcaaaaaacaaaaataattatgcatgatttatggtgagcaaatttcttattgtattggtatgttcccgattttttggtcgcattgatatatcaatacggcacttgctttaaaccattttgcataaagtaagaagtcgtaattacaattaagacaaggaagaagaaatgcaacaagcgaatatgcttaatgaatttaaacttattattggcggtcaactttgttcaggtgaacaaggtgaactggaaattattaatcctgctactggcttaactgcggcacattgtgcaaaagcatcagttgcacaagtgaatcaagctgttagtgcagctaaacaggcttctaaagcttggcagcttgtctcgcatgatgagcgtaaatcaattttaaacaagattgcagacggtattgaaaagcacgctgaaatgcttgcagagctggtggtgcttgaacaaggtaaaccactcgcactggcacaaatggaagtgcaaggtgcaattggctggacgcgttatgcggcttctatggatttaccggtagaagtaattgaagacagtgaaactaaacgtattgaacgccatcgccaaccattgggtgtagtggcttcaattacgccatggaactggccactcatgattgcagtttggcatatcatgcctgctttacgtgcaggtaacgttgtcattagcaaaccttctgaatacacaccattatcgactttacgtttatgtgaaatcattcagcaagaagttccagcaggtgtaatctcaattgtggttggtgctggtgagattggtgaagcattatcttctcatccagatgtgcaaaaagtcgtgtttacgggatcaactcgaacagggcagcacattatggctggtgcagctcagcagctaaaacacttaactttagagcttggtggtaatgatgctggtattgtattaccagatgcaaatatcgatgaaattgctgctaagatttttaatatggcgttcttgaatgctggtcaaacatgtgcggcattaaagcgtttatatgtgcatgaaagccaatatgaggctttatctcaaaagttagctgatattgccaacgctcaagttgtgggtgatggtatggcgtcttctacaacatttggtccagtacaaaaccaaatgcaatataataaggtaaaagctcttattgctgaagcgattgcacaaggtgcaaaagcactctctggacaacaacagctaccagagcagggctactttattgcgccaactattttgactgaagtttctgactcttgccgtgtggtgcaagaagagcaatttggtccagtgttgcctgttttaaaatataccgatatcaacgatgctattgctcgtgccaatgacagtgagtttggtttgggtggttcaatctggtcttctgatcttaaagccgcacagacctatgctacacagcttcaatgtggaacagtttggattaatacccatgcagaagtactgcctcatgcacctttcggaggctggaaaatgtctggcttaggcgctgagtttggtttggaaggtttgcttgaaaatacgatcgggcaaacggttcacatcagtaaagtctaaagattagttttaaggcggatttagtatccgcctttttattttcacttttaagagtgaaaagctgagttactttattgagagtgatgatagctcatgcttttaggtttgattaaaaaatgattctgttctttaatttttttcagaacaatgtaagactttatgtgccctataaaattataagaaagtaatctttcagtcacaaattgcgaaagctgttctaaattttcagcaacgacttttaaaataaaatcagcatcaccactaattgaaaaagcatcctgaatgttatcttcagcttcaatcagctcttggaaagcctgctgtgatttcgcctcgtgtgttcttaagtttatgtgaatcatcgctgtaacttctagtcctagcgcctgttgctggatgcgtgccgtataaccgagaatcacgcctttttgttcaagcaattgacgtcgtcttgaacattgagaagcagataaaccgattaaatctccaatttcctgattggtgagtcttccattcttttgtagtgcctgaatgatttgccagtcgaacttatccattgcataaaatccttttatgatacacaaatcatgtatttttattaaaatgcgttttcattatgcacgaaatctaaaagatagatgaaatattatttttctatggaataaaaattggtctcaaaggatatagagcaatgttcatagaaattggtgaatttttaaatcttcgtctaaaacaaatgggtatccaacatctttttggtgtacctggtgattttaacctctcatatctagaacaagttgaagcagacccacaactcgaatttattggaaattgtaatgaattaaatgctgcctatgcagcagacggttatgcacgaattaacggtttttctgccttggcaaccacttatggtgtaggtgacttaagtgctattaatggtattgccggtgcctatgcagaaaatgtacctcttattcatatctcaggtattccacctttacatgcagttcaaaagggcactctcatacatcatacgttagttgatggtaactacgacaacattatgaactgtatgaaagagttcacagttgcccaaactcgtttaactcctgcaaatgcagcttctgaaattgaccgcgtattgcgtcagtgtttccttgaacgccgtcctgtacacatccaactacctggtgatattactcacgttaaaattgaagtgtctgagcgtccgctcgacctaagctacccagctgttgaacctgaattattgcaaagtgtggtaagcaaactttgtgacattattgagaatgctcaaagtccagcgcttttaattgataatgaggcttcagtttttggtgtaacttcacttttaaatgatttatctcagaaatgctcaattccatttgcaggtatgaatactgcaaaaaatattatggatgaaggctcacctcgttacatcggaacttatgtgggtggagcaagccaaccgcatgtaaaaaatatcattgaacaatctgactgtttaattggtgttggcgcgcgctttaccgatgtaggctcagctgtatttacgcatcaaattgagaccaagaactacatcgaaattaaatcttatggcttgaatatttttggtcaggattttccgggtattgaaattggacaattacttgtcgagctaaataaaaaagttgcaccacgtaaatcgtcaatacctcttcttgaaaaacaacctcagaaagtaattgaagcgccagcccaacagaagcttagtcaagatgtgctttggaactacatttcagggttcttaaaagaagatgatgtgattattggtgaagtaggaacatcaaactctgctttatcaggtatcaaacttcctgctacagctaaatatattgcacagccgctttggggttctattggttataccttgccagctttgcttggtagtttgttagctgctcctgagcgtcgtcaaattttgtttattggtgatggttcattccagcttacggtacaagaactctctacgattatccgccatggtttaaaaccaattatttttttgttgaacaatggcggctacaccattgaacgtttaattatgggtgaaaatgctgcctataacgacgtgcaaaactggaaatacactgaaattccagcggtatttaacggtaaaaaaggccatacaacttatgtggttgagactgctggacagctgaagagcgttttagacaacgttcatcaaaatgatcaattaacctttattgaattgaaactaccagcaatggatgcaccggtgagtttgaaaaaatttgcttctgtgattgcacgttttgactatggtgatcgcggctacgaaattttaaaggagcgttcccaaccagttaaatgtaaggatgcaatctctttttaaatagaagataggacacgtcttctcaaaaattaaatggactcatactaaagcaacttatgtccgaaggtcggtttctggccttcggatatagtgctgaataaaggtgtacaggaagtgacaccaacattggagataatgttatggatgcaaacaataagcacgagttaaaacaaggcttatccaatcggcatattcaactcatcgcactcggaggggcgatcggaacagggttgttcttaggtctatcacaaacaattaaactggcaggtccttcaattttattgggatatgcaattgcaggaattattgcctttttgattatgcgtcatttaggtgaaatggttgttgaagaaccggtaagcggctcttttagttattttgcgaacaaatactggggcaaaatggctggttttatgtctggctggaactactgggttttgtatgtactggtgagtatggctgaactgagtgcgattggtacttttattcagttttggtggccagaaattccgacatggctgaccgctctatttttctttattttaattaacggcattaacttggtaaatgtccgcttttttggggaatcggagttcttattttcctgcattaaaattgttgcgattttaagtatgattggcttcggtgcttatcttttactttcaggctcagcaggtccgcaagcgggtgttgcaaatttatggcaacacggtggtttcttcccgcatggtattcatggctttattatggccttggctgtcattatgtttgcattcggtggtctagagcttatcggtattgcagcagctgaaacgaaaaaacctgaaacaacaattccaaaggcagtaaaccagattgtttatcgcatcctgattttttacattggtgcaatcggtattcttttatgtctttatccatggaatatggtggcagaaggcggtagcccgtttgtcttaattttccagtccctcaatagtaatggcgttgcgaatgttctgaactttgtggtcttgattgctgctatttcggtttataacagttgtatttactgtaatagtcgtatgttgcatggtttagcagagcagggcaatgcgccagcaattttgaaaaaagtaaacagccgcggtattccggtccctgcagcaattgtgtctgcttcaattacagcagtctgtgtagtggtcaactatttaattccaggtcaagcttttcagctctttatgatgttggttgtggctgcgcttgttattaactggcttatgatctcagtcacgcatttgaaatttaccaaagcaatgaaattgcaaaagcgtcaaaccaaattccaaagcattatgagcccatggagtaattatttaactattagctttgtatgtttcattctcattattatggcgatgacaccagatatgaggctcgctgttattttggggcctatctggcttgctgttttagcgattatgtatttctttaagtatcgtaaaaaaatggtcgcaatgccggaagtacaatcaaactaataagctaaatttacagtgatattgcggttatctgacatatgacagataaccgtttttgttttgtcataatattttcatgttcgggcgaaataattttttaaaaataaaggtgacacgtaaaaaattgagaattgtgtcaataaaataattttgtaacatcaattcattaaattacttaagtttttataatttaagcataattataattttattattttgaacatttgtcatatttcccattaaatctaaatatcaaagtatttgtaaaatcatcttaaatatttgatataaaatacatttaaaaatgtgacaatgaacattataaaaatcatgaaagcgtcataatactgtaacttatttgtcatattttctattcacaatgcagctatcgaagagcgtacaagcactcaacaaaaagtgacgtacaacctattgcattaatgagagagaacagaatgcgcttaaatccacgtcaaatcgcaattgcattagcagtaactggggccgctgtaacaacgactgcaaatgcagctcgtgatacgattcaaattgctggttcttcaactgtattaccatttgccagcgttgtagctgaagagtttggtaatacattccctcaatttaaaactcctgttgtaggttctggtggttcttctgctggtttaaaacagttctgtcaaggtgttggtgacaacacaatcgacgttgcaaacgcttctcgtaaaattaaaagcactgaaatcgaagcttgtaacaaagctggtgtaaaacaaattcaagaaatcaaaattggttatgacggtattgtatttgcgtctagctcaagcaaagcagcttataaattaaaaccttaccatgtgtttgctgctttagctgcacagttaccttcaaaaggtaaattggttccaaacccttatactaactggaaccaaattgacaaatcacttcctaatgagcctattacgcttgttattcctgcgtctaaccacggtacgcgtgaagttttccaagaaaaaatggttgaagctggttgcgaagcgtatgaatacttcaagagcctagacaaagatgctcaaaagaaagcatgttctactttccgtaaagacggccgtgtaattgaaattgctggtgactatacagaaactctagctcgcttaaaaacttctccaagtgcagtaggcgtatttggtttaagtttctatgacatgaaccgtgacaagttacgtgtagcgacagtaaacaacgtagttccttctgagaaaactgtgttaaatggtacataccctgtatctcgtccactatacttctatgtaaaaggcgagcacttaaaatcagttaaaggtttaccacaatacgtagaatacttcctaagcaaaaaagcgactggtaaaggttctaaagctgagcgtgatggtttaatcgcgatgtctgatgcagaacgcgctaaagttttagctgactttaaagcaggtaaaactgttaaataagttggtttgaataggggctggtgatctcaagcgatcatcagcctttttgtctaacacgtttttcccaaattatgacaattgagaaaacagtggagaatacatgaatctgctacttatcggtgtgttgttagcccttgtggcaattgcatatcaacttgggctgagaaagagccgccacctagcaggtaagggaagcaactcggcgacattacattctcgtcctggttattatggcgcactggttgggctttggtgcggtatccctgcttttttaattttgatcatttggaacttggttgagccaagtattttaaatcatattatctttaacaacgtacctgcttctgtgacagcttctctagatgaggcagcaagaagtgtacttgttgatcgagttcaagcgatcgcttctggttttggggtaagtgatcatcccgcggcttatgagttggctgctgctcagcaatatgcaaaatttcaaactattggctcttttgccaaatttgctgttgttgtctgtgccgctttgttgggcttagtgtgggcaaagaagaaaatcagccaagaatatcgcgcacgtaaccaagttgagcgtgcaattaatgttggtttgatcttatgttctggcgttgcaattttaaccacgatcggcattgtaatgtcgatgtttggtgaggcaatgcacttcttccattttgtaagtccaatcgactttttctttggtacagaatggaaccccggctttagtacttcaggtaatgcagaaggtagttatggtttattaccattactatggggcacgctcatggtcagtggtattgccttattagttgctgtacctgttggcttaatgattgctatttatttagctgagtatgcttcgccgtggttacgctcatgggcaaaacctaccattgaagttttagcgggtattccaacaatcgtttatggtgtttttgccatgatgattattgggccattctttaaagctgctggtgcgtatgtcggtattgaaattaatgcaaccagcgctttgactgccggttttgtaatgggaattatgattatcccattcgtttcatctttgtctgatgacattattactcaagttcctcgtgcacttcgtgatggttcgttaggacttggcgcaacgaaatcagaaacgattcgccaagtggttttaccggcagctttaccgggtattacaggggcatttttattggctgtttcgcgtgccgtaggggaaaccatgattgtggttttggcagcagggaacagtccacttctacatgcaaatccgtttgaagctgtttcgacagttaccgtaaccattgtaaaacagttaacgggtgatactgattttgcgagcccacaggccttggtggcatttgcactgggattaacactctttgtgatcactttaggattaaacattgttgcactgtacattgtgcgtaaataccgtgagcaatacgaatgagtacatcaaatacatcgtctcctatggatcagaacgtatttgatccacaagctgctgctcaggcacgtgatcgccgtaaaaaagtgattgaaaaatcactggctaaacgtcaccgcaaagaaaaagctttccgctttgcaggtttgtcagcagttgttattggtcttgcattcgttgcgctactgtttggcagtattttggcaaaagggttaccagcattctggcaaaccagtatgaatgtaccagtctacttcgatcctaaagtaattgatgcaggtccagtgccagtacgcacacaaggtgaaacacctgcacattaccaagaacgttatgtcgattggcaaacgaaaatgggtatggtcgattgggatagcctgatcgtaaatggcatgattgctaaagatccttcacttgcatcacaacgcgattatttaagtagcctttatgcaagttctgaagcttatcgcttacgtgatatggtgtttgctgacccatcactcattgggaaaaaagagaacctaactttcttgggtgatgccaatgtagatgtatggctgaagggtaatattgaccgctcattaccagacgaccagcagcaacttgatccggaaatccgcaagttggcagatgaccttaaagcaaaaggtgtacttgaaaatacctttaatacgactttatttaagaatcctgactctcgtagttcaccagcgattagtggtcttgcaggcgcattcatgggttcattattcatgatgctgattgtgatcattatttcaattccaatcggtgttgccagcgcaatctatcttgaagagtttgctccaaagaatgtcattacagacattattgaagtcaacattaataaccttgctgctgtaccttcaatcgtgtttggtttgttgggcgctgcaatatttattggttggatgcatttaccgttgtcagctccttttgtcggtggtttagtattaagtttaatgacactaccaacagtcattattacaacacgtgcttctttaaaggctgtgccaccttcaattcgacaagctgccctaggtttaggtgcgtctaaagtacaaaccgttttccatcatgttttaccgttagcattgccgggcatcatgacgggtgcaattattggtgttgcacacgcactcggtgaaacggcacctttacttttaatcgggatgagtgcattcgttgcaagtgttccaaccaccccatttgatcaagcaactgctttacctgtccaagtttatctatggcagggtaatgagttgcgtaacttcttcgaaggccgtactgctgctgcgattatcgtacttcttgcattaatgattggtttaaacagccttgcaatttggttacgtaaaaagttcgaagtgcgttggtaatagaggataaatcatgaatactattgatattacgaattccttagaaaaggataagttagtgaatactgaacaatctcaacttacagatacacaactgcatcatggcacttcgtacgtttcgcattttgaaccacatgcttcaaaaaagccaaactcaaccgaaatcaagatcagtgcacaagatgcccatgtttattatggtgactttgaagcgattaaaggcatcgatttagatatttatcaaaatgaagtaattgcgtttattgggccatcaggctgcggtaaatcgactttcctgcgtactttaaaccgtatgaacgacacgattgatggctgtcgtgtgacaggtaagatcactctagataacaaaaatatctatgatccaaatctggatgttgtattgctgcgtgcacaggttggtatggtgttccaaaagccaaatccatttcctaaatctatttttgataacgtggcatatggtccgaagctacacggtttagcacgtgacaaatatgacctagaagaaattgttgaaaatagcttgcgtaaagcaggtctatgggaagaagtgaaggatcgtttaaaccaaccgggtactggcttatctggtggccagcaacaacgtttatgtattgcacgtacaattgcagtaagtccagaagtgatcttgatggatgaaccttgttctgcacttgacccaatcgcaacggcaaaagtggaagagctgatttctgaactgtctgatcaatacacaatcgttattgtaacgcactcgatgcaacaagcagcgcgtgtttcagaccgtacagcttacttccatttaggtgatttgattgaagtaaactctacagagaaagtatttactcagcctgaccatcaattgacagaagcgtacattactggccgtttcggttaattgatcgttgtaaaagaaaaagagcctagtgctctttttttatttaataaatgaaaatgactctattttgcaaaatcgctattgaattttaatcaaaagaaccacatcttaaggctataaagacaaacttatgagcatagaattttatgttattccatttgcctaaactccctgcggaaatacgtgtcagtcatttaaatgcacgtgtaaatgaacagagaaaaaaaattgcacaaaccacagcaagtcgtttagaacttttacaattggctcaacaacttgcaaaagaagctaaaattcgccgtaagaacaaccagaaaatttttgttttagattttaaaggtgacattcaggcatctgcggttgaaaatcttcgtgaagaaatcacccttattttagcaacggctaaagctggacgtgaccgtgttgtggtacgtcttgaaagccctggtggtatggttcatggatatggattggcggcagctcaattggttcgtttgcgtgatgcaggttttcatttaacgatttgtgtcgataaggtcgcggcaagtggcggctacatgatggcttgtattgcaaatgaaattatttctgcaccgtttgctgtcgtgggttcgattggtgttgtggctcaggtaccaaattttaatcgtcttttaaaagaacataacgtggacttcgaactttacacagcagggcaatataaacgtactgtcaccatgtttggtgagaatactcctgaaggtaaggcgaagtttgaagaagagctacaacaaacgcatgtgttgtttaagcactttgtagagaaatatcgtccacagcttaatgtggacaaggttgctacaggtgaacattggtatggtcaagatgcacttgatttaaaccttgtagacaaactacaaacttccgatgagtatctattagcattgttacctcagcatgatgtatatgtaattaatacccgtaaaaaagcaactttgggtgaaaaattaggtttacaagcagctcaaatggcagatagcctgatcccggctgtaatgaataaagtggctgatactttagcaaaagcgaattcaactttagttcaaatgcgcgatactaaattttaattaagatatattttcaaattaaagagtgccttttaggggtgctcttttttatgcgaaagactaaaagaatttagtttgaattgccggaatgcccattcatttttataaaaaatagatattgaataaagattcaaaaaaaattgttgataaatatacttattgaattgtgataaataagtgattttgatattttaggcaacaataaaatagcttttagatgatccatttaaaagataaacatttaaaaatataactgaaatttaggacaggaaataatgacaagaataattgtagcatccaaagagggtttggacgttctgcaagatggtcagctcaataaggtggttttaaaccaacctactattattcaaattggtgtaagtcaaaaagatatcgcatcgatggaaaagcagggtggaagtctagtcatccatttaaaaaatggagaaacaattgtcttagaaaatttctttaatgaagcaacgaatacaacagagcattcactcgtttttccaactgaacaaggaaaatttgttgaagcacaatttgatgctcaaggtaaggttatagattatagaggcttaaatcatgttacggatttggcctataccagtaccagcccttcaactgcaacaatggccgttgataatgatccaagcttttcaatgggtaatgtactaaaagcaggcttagcagttttagccgctgaaggtttatatctttgggcatttgataaagatgacaaagatgattcacccagcactcccgatttaatagcacctgctgctcctacagctacgcttgctgatgatactgtgacagtgactggcaaaactgaagcaaatgcgaaaatctacattaaagatgcagcaggtaatacagtggcctcaggtgttgctgatgcgagcggaaattacacgattaaattagataagccgttagtgaatggggataaattaaatgttattgcccaagatgcggctggaaataattctaaagttactgtggtaacaggaacaaaagatacaattgccccagatgttccacaagctcaattgagtgatgatggttccttagtgacaggtaaagcagaagcaaatgcaaaaattactgtttatgatgccactggcaaagtattaggaactgtttttgcgaataaagatggtatttattctttaaaacttactccaccattaaccagtgaagcgggcggtaaagtggttgccgaagatgctgcgggtaacaaatctgaggaagttaaaattattgcgggtaaagataccataccaccagcatctccttttgttgaagtaaataaagaaggatcggtaatccatggtaaaactgaagcaaatgcaaaagttcaaataaaagatgccgatggtaaagtgattggaagtgggaccgccgatgctcaaggtgaatttcaaattacactttcacctgctttaaaagaggcgcaaaagggcacagtggttgtggaagatgctgctggtaatgtatctaaaccagttgaaattacgccaggctttgactcgattgcaccagataaaccgactgttcaaattaatacagatggtacttctgtaaccggtacggctgaggccaatgccaaaattgaaattaaagatacaacagggaaggtaattggtagtggaacagcggatgcgaatggaaaatttacaatttctatttcaccagctttaacggataataaacatgcttcggtatcagctatagataatgctggaaataagtctgaagttgttgatattgtaggtacaaaagatacaacaccaccagcaaaacctatattaaatagcgtagatgatgatgtaggcgctgttaaaggagctataacggctggttctgaaactgacgatgctagaccaaaacttacaggctcaggtgaagcaaatgcaactcttacgatttatgataatggtgttgcaattggagttgtgacggtaacaagtggtagatcttggtcatttacatttgataaagacttagctcttggtaagcatactattactttgactcaaactgatgcggcaggccttaccagtgaggcaagttctccatttaccttttatgtagttgcaccgaaaactgcgagcctgtctgaaacttcagtagatactttaagtacagaagggccatctttggcagatagtgtcggactgcatactttaaaggcagcgcaaagtacaacaactgagacgaataacccgcagaaatcggttcctttagatgatttattaaaaagttctacggctagtgaatcagacccaatcgcaaagcttctctcatcaacagcgttaaaaacgactcaggcatctgagccaatcgaagtaaatgcatcagttggtcagataacatcaaatcctgatcatcctttacctgatacaacttcttcggttttacaaaaccttttagatcaaacttatccagttgtttagggtatttgagacaacatgtaaaaagcgctcaatgagcgcttttttaattttaatttattgtttgattttttggtgttgtgagaagagcgattagcccatagaggattgcgccaattgtagcgattaacatgtctttatgtgcatcccacatatcaccttgttgcccattataattttcagcttgttcaggtgatagcccgattgcaattacccattcgatcagttcataaaagacactagacgccatcacaaactggactacaagtaagaataaagaaaaaggacgtgcagtgggtaaccatacttggaatacacgataaataagaggatagagcaaaacaccataggcaagatgaactaaacgatcatacatattgcgggaccaacccatatattgatctaggttgaaatggaacacctgttgtatccagtcattgtatggaacgtaggagtagagatagtgagcaccaataatatggattaataaaaacagtagataaaaagtaaaacttaagaaatccagtccaatttttttgaaaataataaaaagcagaatcaccataaaaacagtgccagcttgatgaagcaaataagcctcaaactcaagtggttgaatacctgaaatgataatggcaataaaaagcaggccaagtgcaatatagtgtttaactttgaattctttttcgatcattttataaataagtctttattctgatttgtatgagtgtaataaaaaagcgaagcctaagcttcgctttttataacttttttaattagattttgctaattaattcgttaatttgtttagcttgttcagcagcattacctgtgtaagttgcaggtgtaagctcagctaagcgggcacgctcttcacttggtacttgagcaagttcgttaccatttacgaagtcaaccatcatgtcacgcgtcattgcttgaccacgagttaatgcttttaacttctcatatggtttttcaacattataacgacgcataactgtttgaattggctctgcaagaacttcttgagcttggtcaagatcttcatttaagcggtttgcattgagttcaagtttaccaataccttttaagcaagcatcaaaagcaattaagctttgagcaaaaccaacacccatgttacgaagtacagttgagtcagttaagtcacgctgccagcgagaaattggtaatttttcgcctaagtgagccaacactgcatttgcaatacctaagttaccttcagagttttcaaagtcgattgggttaactttgtgcggcatagttgatgagccaacttcaccttctttaagtttttgcttgaagtaacctaaagagatataaccccatacgtcacggttaaagtcgatcaaaattgtattgaaacgacgtaacgcgtcaaataattcagccatgtagtcgtgtggctcaatttgagttgtatatgggttaaatgttaaacctaaagattcaacaaaagcttgtgaatgcgctggccaatccacatttggataagcagaaaggtgagcattgtagttacctacagcaccattgattttgcctagtaattcaacattttcaaattgtttgatttggcgagctaaacgatatgcaacgttcgccatttctttacccaaagttgttgggctagcagtttgaccatgtgtacgagacaacatcggttgttcagcatgagttgtagctaaagcagagattgcatttaaaatttgcttcatgcttgatactaaaacttcacgaccgtttttaagcataagtgcatgagacaagttattgatgtcttctgatgtacaagcaaagtgaatgaactcacccgcattttgtaattcagcaatacctgcaattttctctttcaagaagtattcaactgcttttacgtcatggttagttgtgcgttcaatttctttaatgcggttcgcatcttcttcagagaagttgcttacgattgcatctagtgctgcatttgtttcagctgagaaaggagcaacttcaacaatttccggacggttagaaagcgcttgtaaccaacgcacttccacagtgacacgagcatgaattaaaccaaactcagaaagaaaagggcgtagcgcatcacatttgctggcataacgtccatctaatggtgatagtgcggttaaagcgttcataacgattccttaatgctggaataaacataaaacaaaaataatctcgttacagccttagataacttggtactgtaaacgagcaagtgcttgaatatcctgtagcaatttacgtttgctaaaaatcatgttccatgaactaccgccgagttgtcgccataaatgggccatttgtagccccgtaaacagacaagcacgaatacggttggtatggttggtatctttaaatgcctcagcattaccacgaacaagaatgcgtggattaatctgtccggcagtatcaacataggtttgcgccaaattggctaaaatacttgggtgtaaatagttattatcaaaaaaagaaagctgttttaaaatcttctgctgcgctttttcaataatcgccacatattcaggattgctatagacctttttctctaactgcaaaagtgacatcgcataagacataggaagttttgcactacgcattttaggcaaacgagatttaggcgcattggtaaaaggctgagtgatacaattttcaagagttttaagacccaacgaaatatcagccaattgattaaaaaaatccaacgtctgaacagcattattatttgttgtagggcgaatatttaaactcgcctttattaataactcaaaataaaagttaccactttcaccaatactttgctgacctgtcatggcggtcatatgcgtaagctgggtcgcttgaaataccccagccaaggcaagggcacggttttggcgaacattcaaggcttgtgattgttgaaagggtaactccaccatgccattcattcccttaaataaaatttggtgtaggggcgtttgtatggtgaataacacccccgcctaggcaaacttcatccgaataaaatacaacactttggcctggtgtaactgcacgttgaggttcatcaaactcaacacgaacaccatgctcactattttcatcaataaacactgtacaagcttgatcaggctggcgatagcgtgttttagcggtgcaacgtaatccttcagccggaatattttgctcgcctgctacccagtcaatggcctcactccaaagctgtgtactttgcataagtgggtgatcatgtccttggccgaccactaaacggttattggcaacatctttatgaagtacaaaccatgcaccttctgatgcacctttcataccgcctagaccaataccgccacgttgaccgagcgtatagtacatcagaccgtgatgttcaccaacttctttgccgttatcaagtacaattttacctggttgagcgggtaaatattgtttaaggaagtcattaaagcgacgttcaccgataaaacatataccagttgaatcttttttcttcgcagttgctaagtccagttcttcagcaattctacgaacttccggtttttcaatttcccctaccgggaaaagggttttattaatttcacggccatgcactgcatgtaagaaataagtttggtctttatttttatctaaaccacgtaataaaggtgcatatgcttcacctttagagttataagcagtttcagcacgacgagcataatgacctgttgcaataaaatctgcacctaaggtcatggcatgatctaaaaatgcgcgaaacttaatttctttattacataagatatctgggtttggagtgcgaccggctgcatattcagccaagaagtgttcgaatacgcggtcccaatattccatagcaaagtttgcagtatgaagcttaataccgattttatctgcgactgcttgagcatcggctaaatcttccattgccgtacagtattccgtgccgtcatcttcctcccagtttttcatgaaaaggccttcaacttgataaccctgttgaagtaagagcgccgcagaaacagaggaatctacgccaccagacataccgacgatgacacgttgttgcataggactaggcatccaaatgagaagttaatgagggagagaaagggtgctcataaataagagctaaaggataatgttgtcctttcatggcgtcttcaatggctttaatgacaagaggactacgtgcacgggcagattctttaagttcatctagagtcatccagacagcagaaacaatacctgtatcaagttttgggtcgctttcgacgtgggtcacatgtgctaaaaagcagaagcgataataagtacggtccggaaacataggcggggtataagtataaataccaagtagggcatctatatctatatgatgtcctgtttcttcaagcgtttcacggatcgctgcttctgttagtgtttcaccacattccacatgaccagcaggttgattaaacactgtgtgtacaaaaccttcgctatgttcttcgacaaaaagatagcgtccatctttttctacgactgtagcgacagtgacatgaggagtccatgcggccataaaaaagcaccatgaatttaaaagtcgtatgatacgaaatttaggggtttttggctacggtcatcttacaaacgatagagcatgcgaataactctatcgtttgaaaaactcgatttgttttaatttatttgattatctttatggttattttgcacttttacataatgtcttgctgagtaaggtaaaaatgccaattctttttcggttagaggacgtacttgttgtacggggcttccaacataaagataaccactttttaagactttacgaggcggaactaagcttcccgcaccaatcatcacatcatcttcaataacaacatcatctaaaataaccgtattgattccgactagtacgcggttaccaatagtacagccatgtaaggtaacatgatggcctactgtcacatcttcaccaataataagaggtgaaccattaggttttgtatcatttttatggctgacatgtagcatacagtggtcttgtacattactgtttttgccaatttgaatactgtttacatctccgcgaatgactgcaaaaggccacaccgaaacattttcggccaatttaacatcacctacaaccacggacatttcatcaatgtaacagcttggatcaatttgtgggtgatggtctaaataaggacggatgttttttgccatgagaagtatcaatagaaaatttagtaaaagtataaaataaaaaagcactcacgctaatagcatgagtgcttaattcaactattctaaaattatttaaatttagaataagttgctgaagaattgtttgatatggtcaattaaacgtgcgaagaaaccagcttcttcaacaggttttaaagcaaccaatggtttttcagcaataactttaccatctaaactagcaacaagcttaccaacgacttgacctttttgaagtggtgcacttaggttcggttgaacaaccaactgagttttaatgccgtccgctttgcctttaggcatagtcacattaaagttttcagctaaaccaacctgaacttcattttctttaccaaaccaaactttagcttttgcaagcacttggtttgcaggttgtacatttgcagtttcaaagtttgcaaaaccccatgccaataatgcacgagtttggtcagcacgttcagacatgcttggtgtaccgaaaataactgagattaaacgcattggaccgcgtttacttgaagttgttaagcagtaaccagcttcatcagtatggcctgtttttaagccatcaacacttgggtcagtgtaaagtaaagcattacggttaccttgtttgataccgttaaatgtgaattctttttcagaataaatcgggtagtattttgagctgtctttaataatatgttgtgctaaaacagccatatcttttgcagttgagtaatgaccttcagctggcataccagttgagttaataaactgggtattggtcattccgatacgttttgcttcctggttcatcatgtgagcaaaagtaccttcattcccagcaatatgttcagccattgcttttgatgcatcattacctgactggataataataccgcgaagcatttctaaaacagttgctgtgccatttaatggaacatacatacatgattcagaactactgcctttacaccaagcagattcattcatacgaacctgttcattttcggtaagctcaccttttaataatttttgttcaatgatgtagcttgtcatcattttagtcatagaagcaggagcaagcttttcattttcatttttagaagcgagaatttgtcctgtctcgtaatccattaatacataagacttattatttaattctggcggagctgataagacagttgctgcataagaaaaacttggtaagaggaggagtgcagcaatagcgctttttcgagtcattctaggtaattccaatatcttgtatgaagcagaagagcctagcattttaggataaagcaaagccgacttctatgggggaagtcggctttttcaaacagtattgtaactagagagtttttaactaatttagttttgcgattgataagctttcacgtcttggcaaactaacgtattttgttcgttaccagcagcttttgcatcattacgtgcttcttttaagactttcttgaagctcttgtctttactacgtttttctaaagctgcaactggatcggcttcatttggcaaatagtcttttacaagacgctcataaccttgagcaaattcggcatcttttttaccaattaaacttgggcaaatttcagaaagtacttgaattgctgctaattcttccggtgtagtacctttggacggtgtaacttcaacaacattttcattttcagttttcttttcagctgtttttttcttgtcagcagcataacccactgttgccattgtcatgagtaaaacaacagaaagtgattgaactaaactttttttcataaacatggataacctgaaacaaaaatttgaaatatgccgatagcttaaacaatttaaacgctaaaaaaatggaaaaaatgtattgttatgtaggttttctgctttatctcaacagaaaaccccaaagataagtgtactgattgagctaagctcttaatctttgtaatttaccacttcctcacaaagttcatgttgttcgtggtgatccatttctttggcagcctgacgtgcttcacttaacagggttttatattctgaatcattttgcagcgcagagaaggtaattgatttattggaataaccactcaggtacattgcaataatcttttgagtattggtttcaagttttttatttgcaccaacaaaagtagggcaaatttcctgtaagacttgagtagaggcaatgtcatctttaattaagctgtcagcttcttgtgttgagataccctcatcagcaaaaaccgcttgagtacacaatgtgatactgatccccaatacttgaaaaaaaggagcgaaagttttcattttttcacaattttataatgctatggaggcataaatatatataattcaacaaataattcaattgagaaaacctctgggtttatttgtcgagaaagattttttgtgaatattttaattgccaatgatgacggtgtctttgcaccaggtatacaagctttagctgacgcattaaaaccactaggccgtgttgtagtggttgctccagaaagtgaaagaagcgggttttcgagtgccttaactttagatcgtcctttacgtcctattcaaattgctgaagatgtatgggctgttaatggaacaccagccgattgtgtttatttatccatgaatggattatttgatttcgaatttgatttggttgtcagtgggatcaatagtggcgcaaatttaggcgatgatgttttatattcgggaactgttggtgcagcctttgaaggtcgtttaatgaaacaacctgcaattgcggtttctttggctgggcctgatgtacgttcatacgaccataaagatgattatgcgcaagcagctaaatgggtacatgactttatcgcaaaaggattacctgcactgccaccgcgacatatttttaatattaatattccagatgtacctcagcttaaaggtacacaaattacttaccaaggccgccgtgcccaatctaaacctatcaccagccatgtagaccctagaggaagacaggtttactggattggtcttgcgggtgaggcggtaactgatccacagcgtattgctagtcaaatacaatctgatttttttgcggtcgcgaatggttttgtgagcgtgacgccaattcagatggatgcaacaaactatgcggttttagaagatttgcaggccagtttggggtaataaactgagccgaatgttataactttgtgaataaagaaaaagaggaacatgtttcctcttacttttttggtactcttagccgaaatgatttgtagcatttagtgagggagatcgatgcatttaactgggcaacaaagcagattgcatattcaaagagacaaaataatgaaaattatgatgttgtctgtagctgtaggttttactgttgcaatggcaggatgtgcttctaaaccacaaattaataatagttctcgctatgcaatggctcctaactattacacagtccgttcaggtgatactttaagtggtattgcaatgcgctatggtctggactatctcagtattgcagagatgaatggtattgcaccgccatatcgtatttatgttaatcaatcattacgattgaagaaatcttcttcaccaagaactgtgtcgacacaagtcatggcgcaaccggaaccaattaagcgtcaaacaattgctttaccgacaactactgcaccaaccacaaccactccaccgccagcaactgttgcgccatcaaccaatacaacagtgggagcatctattccaagctcaagcttacgttgggtgaaaccaaataacggtccggttattcaaggctttaatttggcgaataatgtcaaaggaatccgttacggtggtaaccaaggtgacccgatttatgcggcggctgatggtcaagttgtatacgcagccgatggtctgaaagaatatggtaacttagttttaattaaacatattgatggttacatcagtgcgtatgcccacaatagcaagatgatggtgaagagtggtgacaatgtaaccgcaggccaaaagattgctgaaatggggtcttcaggggcatctcgcgttatgcttgagttccaaattcgccttgacggtaaaccgatcaaccctgcaaatcttttaccaaattagctaatgcattaaatataggtttcctcgtataatacaattggttgctttcattacaacaataagcattttttataaatttagaattagatttgaggaaacctatgttagatcagcttcgtgcgatgggtgtttttgcttgtgtggttgaaaaaagttcatttagtggtgcggcacgtgaattaggcattacaacaagtgctgtaagtcagcaaatccgttctcttgaaaatgaaatggatgtaattttattacatcgttctacgcgaaaacttagtttgactgaggcagggcaggcttttttctcaagttgccaagaaatgttggcagccgcagaaagaggcaaaatcagaatcaatgaattgcgagatgatttgattggtgacttgcgtattgcaactacccctgatttagcagttcagcacattattcctgctttatctcactggatgtctgcccatcgtggtctatctgttcattttgaagtggggcatcgatatatcgatttaatcgaagagcgaattgatattgcagtgcgcatgagttctacagcggtagaagagagcgactctgttattcctatggcttttgtcgatcagattttggtagcctctcccagctatctcaatcaaacaagcccgatcttgcatccaaatgatttaaacaaccatgagttgctttctatcaatgcaatgaatgactcacgtagttttaattttcagcacgctaaaactggtgaaaaattaaatatagagatggcaagccgtttgcaaagtaataatttacaagtggctaaagcgctatgccagcaagggcatggaattgccagaattttatatttagatgctcaaaaagaattaaagaatggttctttaattgaaatccttccagattggaaactcccagctttcactttatacgcagagattgcaaaacacgatcaacagccaatgaaaattcaacgttgtgtcgaagcgcttaagcaatactttagtcagttggctggcggaagagcaatgcagattgttcgttaatttttacctcattcatagaaaagggcttgtaaaaacaagcccttttttatgtcagtgttatttttgctttagcgtagcaacttcctcttgagtttcttgaggaagatcatcggctgtgagctcttcatgctttttaatttttttcttatttttctttttcttctttggctcctcttcaacttctgcgccatcttcgatcgcttgccagtattcaagctgttccattacagcagcataaatagagtgtttgctgtatttgccttttttgtcgagagtaccaacagggcgagccattaaaatctcaagtgcttgatcaattgtatcaattgcatggatatggaattgacccattcgcaccgcatcaatcacatcttgacgtagcattaagtgttgcatgttttggcgtggaataatgacaccctgtttgccagttaaaccttgtagcttacatgcatcatagaagccttcaattttcgcatttacgccaccaattggttgaacttgacctaactggttcatagaaccggtaattgcccatgactgatcaattggtaactgactaattgcagagattaatgcagaaagctcggcaactgttgcactgtcgccgtccacttggccgtagctctgttcaaaagccagagcagcagaaaaatgtaaaatctgttcacgtccaaagtgagcttttaagaagctagacatgagtaacacgcctttggcatgcaatgaaccacctagttctacgctacgttcaatatcaagaatatcaccaccgccttgataaaccgaggcagttaagcgtgaaggtaaaccaaactcaacatctgcatagtgaatgacagagagggcattaatttgacctaaacgatggccagaagtttcgattaactgggttccacgcgataaatcttgccagtaaagttctcttaaatagcctaagcgatattgtcggtgttgtagggcaaggttaatgtgctggtcggttaccatcttatcattggctttaaatgcatgatgatgcgcttcacgaataagatcacccaacgttgaagcatgtaacgacaatgagctttggtcttcggcctgacggcttgagtctgtcagtaatgccgctagagcactgcggtcaaatggaagcagtttatcggcttgtacatagtctgcaatcagctgcatataagcttgttcattttcgtcattacgttgtaatgtatcggtaaaatctgcgcgaattttaaatacgctaccaagctctggttctacttctaaaatttcataataaatctcaggctctgccatcagtaccactttaatatcaagtggaatagcagcaggctctatcgagatactgccggttaaagtcaacatatgttcaagagaagagagcttgagttggcccgattttaaggcacgctttaaaccttgccatgcataaggctgttcgagtagttgttcagcctccagcattaaaaaaccaccattggcttgatgtagggcaccgggacgaataagagtgaaatctgtagtaattgtgccgttgtgggtgagttgttctacatgacccagcaagttgtagtgcgttgggaaatcttcaaaaataactggtgcaccgctatttggcttgtttgagacaatcacatttgcttgataacgcgctggtacacgattgaacatagcaggagcaaagtcatcttcttcttgttctaaaattaactcaacattgtcaatgatatcttgagcatactgttttaaataatcttcaaggcctttcacttgcccatatttatttaaaattaagtccatgcgtggcataaccacttgagtggcgatgtctcgatttaaaacagaaactttgtcgcgtgcatcatcttctaagtcgcccaaatgcagaccaagacgctcaagctttttatccatatagcgaatattggctgcaatctcagcacgctgtttgctatttaaagcgtcaatttctgtttgagtcagttcttgaacctgattatcttttaactgtacaggtacaaagccatgtttctcatttcgagaaatcaattttagatcaagttcttcgccttctttcgttaattcgacaagtgcttgttgctgttcatcaccagtttcctgacggattcgctcgatacggttatgataagtctctgcgctaaaacgacgttcaagctgctttaaaataatttgccaagtttgatgaagagtttgttgaaacttggttccttgtccagcaggaaagcgtagcgcaataggctgacgagcctgtttaaagttataaacatatacccaatcatctggagtaggcactgttttggcatgttgttgtagtaaacgcttaatcatggtgcgtttacctaagcctgctgttcctaccgcaaaaatgttataaccagagtagggtaaggaaataccggcttctaccgaagctttggcgcgatcttgccctaaaaagttgttgagcggcttgatgcgttttgttgaggctggaatattttcaaaatttggaatatgcgtaagttgttcgggttttaacgctgttttatctaaagtcattttaatatcaggttgctcaaaagctgaaggaaatgcatttattgtgacgtttgtggtgtttgttttagcgagtgataaagttgaagatgtcacttgatcaagtttttgtgtcactgttgatatccagcaaaagaaaacgaaggttgaagattaaaggtatacaggtttagcataaaatatcaagcaaacttgccgtttttatcatcaaaacaaaacttgattgcataaagaatcttgaaagcaattgtaagaagcgattgaataggcgcatttataatttatggaaaataaaaaacgaatgaccacacaaacctctggttgggtctcggcgtttaaagcatttttagaccgtcgtgcattaattatgctatttctgggtttttctgccggaatacccattttattgattttctctagtctctctttatggctaggtgaagcaggcattgataaaagtgccgtcacttttttcagttgggcggctttaggatattcctttaaatttgtttgggctcccttaattgatgagttacctgtaccagtcttaactaaagctttaggccgaagacgtgcatggttgcttattgcgcagtgtttaatcgtacttgcgatatgtacaatggcttttgccgaccctgctttaggtcacagttatcttgttcaaatggcggcaggcgcagttttacttggcttctcggctgcaacgcaagatattgtgattgatgcttatcgtattgagctggctgaaactgaaatgcagacagtgttggcatcaacttataatgcgggttaccggatcggtatgattgtagctggtgctggtgcattattcttagcggcgcatttggggaccgcaaaaggaaattatatttacgaggcttggaagacgacctatttaacgatggcagcagtcatgttggtcggtattattacaactttactcgttcgtgaacctaaagttgatcgtatatataaaaactataaatcaagtgattattaccgtctggttttagtattttttattgcagttatctcatttgtattaacctatatttactcaggccaagttaccgaagcaatttcaaaagctggcaatattcaagatagtgctgctttatttggtttagaagctttaaggttcttaacggcgacaggtgttgccattctagctggttatctattggttaaaataggtgtggtgaaccagcaaatggctaaggaaacttggattgccccaattctggatttctttaaacgttatggtgtcaaacttgccttagtacttctattcttgattgggttcttccgtatttcagacattattgctggtgtgatttctaatgtcttttatcaagatctgaactttagcaaagaacaaattgctgaagccgtaaaagtttatggtgttattttcagtttggtgggtggtttcttaggtggcttattagctcaacgtatgaacatcatgaaactgatgttcgttggtgctgtattggcaagctctactaatctcattttcattggcttagtaaaatctggaaaaccgcttgatatggtggatgtccaaattgggaataaccattataaagtgaagccagatgaagtggggtattggaagctcaaagtgccaagctcaagttttaatggcacccaacaaattgatgtcaaagctggttatgctttgcaagatcaacaagccgagactatcgttcgggctcaacctctagtgacaactcactctgagagtgttcctttacaaattttacctttaatgggaagtgatcagatatcggctaactcttccgaaggcagtgtcgtgattcgtgggcagtattttggtaaagccttatcacctactcaaaagattgtggtgaatcttgatggacaaaattttgatgcaaaaatgacagatcaaaagggcgtgtttaacgcagcaattgatatgcaaaaattattgtcatcaccaagtaagcaacttactgcttcaattgtcgatggaaatcaaaaaatattatcgattgctcaccattatgaagtcgcttcaaattctgtaccaaaacctgaattagatgtgaatattgatcctttaccgtacattgatactcaatcaggtcaagaagttgagattagtggtaaagtcattaaaccttatagctcactatggctttattttgccattgttgttgataacatggcttcaggcttagccggtgcggcatttattgcgttcctttcaagtttgaccagtgtgtcatttactgctgttcaatatgcgatctttagctcacttatgacccttaccccaaaacttttaggtggatattcgggtaccatagtgagtaatattggatacccaaacttctttttgatgaccacaatgatcgggattccaatcttaattttagttgtttgggttggaaaactgcttaaagatcatcaaacacatgacatagaaaaggcaggtgaataaacatgcgaatgcttcatacaatgttgcgagtaggcaatttagaacaatctttaaagttctataccgaagtattagggatgaagttacttcgtaagcgtgattatgaagaaggtcgctttacactggcatttgttggttatggcgatgaagaaaataataccgtgcttgaacttactcataactgggatacctcaagttatgatttaggaaatggctatggtcacattgcgattggtgttgaagatgcttataaagcatgtgaagaaatcaaagcacgtggtggtaaagtcgttcgtgaagctggcccaatgaagggtggtgtaacggtgattgcatttgttgaagatccggatggctacaaagtcgagcttattcaacaagacgcaaatgctagaaataattaaataaatgactcaggcgctttaagatttaggtcttaaaagtctagctttatttttatagcccagtatgatgaaggcttgaccaaatggtcaatttatcaactgggcttttctttatctaaaataatcataggatgtgaacatgctgaagttcttggcacttgatcgatttacaattttgttggttggcatggtactactagcaactttttttccagtcagtggtcaagctgcgcagtatttcaatacattaactacagtcgcgattgctattttatttttcttgcatggtgccaagctgtctcgtgaggcagtcattgaaggtattttgcattggaaaatgcacttactggtatttgcaattacattctttatttttcctgctattggtttattggctaaacctattcttttacctctattagggcagcagctctattggggttttttgtttatgtgtttcttgccatctactgttcagtcttctattgcatttacttcagttgcaaaagggaatgtagcgggggcagtatgtagtgcatctttctcaaacttggtaggtatgtttattacgccagttttagtcagtttctttattttaggacaaagtcagcacggatttgatcctacatcttcaattatacaaattactttgttgctattagtgccttttgttttagggcaattacttcgtccctatgtttttccatatatggcaaaagtaccaagtattgtaaaagcatttgaccaaggttcaattttgatggtggtctatggtgcatttagtggggcagtggttgcggggctttggcatcaggtgagttggaaaaccttactgcttttaaccattgcttgttctgttttactcaccattattatgctgcttgcactttatttaccgcgcgcttttggttttaaccgagctgatcaaattacagtgttcttttgtggctcaaaaaagaccttggccagtggtgtacctatggcacaaatcttatttattggccaacctttaggtatgattgttttaccaattatgatctttcaccaaatccagttaatggtctgtggggtaattgcaaattacttggctaaatcccaagattaattcgcaaaaaaaatttatatggcgtataatactgcccacttgttgtgcttagctctaacccttgaggtttcggtgggccaaaagaatggtctgttgtggtgttgatctgcttgtaaaagctttcctcaatttaattgagagtgatcaattgcgatgacagcttaagcctttcttcaattaggagtaatcgacgatgcgcgccgatattcacccaaaatatgaaaaattagttgcaacttgttcttgcggtaacgtaatcgaaactcgttctgctttaggtaaagaaactatttaccttgacgtatgttcagcttgccaccctttctacactggtaaacaaaagaatgtagacactggtggtcgtatcgacaaattcaaacaacgttttgctggtatgtctcgctctatcaagcgttaatacttcaaaacgaaacaaaaaacgggcttatgcccgttttttgtttttaatatacaagaccattattggtcttgtacatctgttaagcggtcaagttttttctggaaataatccccttgtagaaagcgcgcttctacattccatgcattggcaaacaggttcatatcattcaagtgagctaataaaattccaatcggttttacagtcaaatagttcaatattttttcttgcaagttattaagcccttggtctgagcttaatagatcagttttgctggactgtaattttacaagatgaatatcaagctgctgtaatattgaatcgctatacatagaagaagcaaaatctcgaattgaaatttccgcaccatgttggcgtaagcgagcaatgtgctgttgagcaattggaagataaggctgaagagcttgttctgaaaattgcaaaatcagtgggctttcaattttacttccgataatagttagtagtttggaaatcagctcagggaatgttttatcttttagcaaaatatcaatattaaggttaataatgagtttcgctttaggatactgagcaatgaaattatgaagctgtttacacgcttctaccaatatccagcggtctaactgaattgaaagttcggcatcttctttaagatcacttaaatcatttaagtcataccattgttcaccagcaataaaaccacttgtcacttcatagttatgagtttcttggtcatgcttatcgtaaatttgctggtacttcagatgtatttcgccctgagctagtttttgtcttaattgctggagcaaagaggactgaggcgtatggtcaaaatgttcaattgttaaatcaagaggaacagcttcaatgctcggtgaaaccgttttgtctacggttggcattacttcaagttgaggtgtaacctgaggtaagccttgcttttccgcctcgttcaataatgagctaaaagagttctcagttaatggttggttgagaaaagcataaccaagctttaactgcactgaaaagttttgctcattcacttttaacaagtgttctttttgcaaagtttgtaaactcgtcagctgtgagtttaaaactgaactattttcggcttgtaaaatcccgacataactacccaagtcgacttggaaaatcggcatctgtgcatggtcttttaaaaaaccatggagctgattgaaatattgccctaaagtttgccaaccctgttgaaaaattcgttctgggcactgtgcaagtctaaataaaacaacggcgtttgcttgggcagggtgggtcgataaatgacgattaatctgcggccaagctgcactcaacccaacacttttttcggacggagcactatttgctggagcagttaaatcaacttgatagtcgatggtgagttgtactgcgtcttcttcttggcttggaataaactcgagttttagcgcattattaccagaaataccctgatgctgactctgaatttcaaagcgtgcttgatcgaactggcctaaagaaattttcttaaaccgctgtttaaaaatatttaaatcgttgggttgtaagacatctaaaatcggcaatccaataatatcttcttctttctggaaaccaaaaagattcaaatattcggtatttgccttaatgtggatgccttcttgaaaaatagcaaccgctttatggctgttgtcgaccagcgtttgcgtatgcgtatgaatggtatcaagctcggccaaaagatgttgttccgtctgtaaaaggcggctgtatgacagtgcccgaaccagcgtaatatagaaataatctagcggttctaatgggactacatcataaatccctttttgaatatagctttgatattgctgcgcttggtaatcatctggctgtaaaagtaatattggaagctgcggctgttctgaggcttgaacaagggagagagtttgttcaattttcaaatcataggcgcgaccaaaaataatgacatcccaagatgtattgagctgcttttcaaaactttttaaatcatcaagtaataaggcattaacttgataatcattccccgataataaatttaaaatttggttataacgtaactggttatcatcaataatgagtaaacgtatttcagtacgttttaaccttttagatagtaaagagtttctcactttaatgcttcccataaatcttggctattcacggtgttattctttttcagcatgaactgatcaagcaggtactgttgctgctcattcagaagctcaaattgaaattgaataaaactttgagtaatgagttgtgctttgagtagatacactttgatttcttctgtccccaatcgtaaatgaattgtttgttgctctctaaaaatttgagaccccggtaaaataagcgtgttttgtatttcttctaagttttgagtttgtagtaataatgcagggtgataattacgtgtatgacgctctgcctgaatatgtacagcgcaagggaacatggcttgtgaaagaatttctaaacccagttccagacttttttctgtagattgtttaatccagcgaattacaccgccacgccactgaccatgtagcgtttccttcaccaaaatatattcgccagttcttaagtttttaggtgcttcgccggaccatttaatacgatagccattaacactaatatcaagtacggtagtttgataaatggttttactctcacggcttaagcgttgataagacgaggtttgttgttcttttttctctaaattggataagactttcgattcactttgtaaattatagttattacttagttgtagcgtttcttcaaagtttttggctttagacaaatagaaatgtgcagtacttaagccaaaacaaatttgtaaagctgcattatattcataacgctcatgacggcgctgtgctgtggtgcccaaaatcgtttgaacgtgaaactttaatgcgggacttaaataaatcttttcatttttagacatatattgagcatttttatgcatggtggcagtgacatgctcaagcaaagcttgcgtgctaataaaaatacttgggttgaaattcgagctttgttttttgttatatacaggcggatgatctttagttgggtccaccacatactttgttgaagcagtgtctttcggcaagatctgaatcatgcgtgcccaatcaaaactacattgaaacagggcttgaatttctgactggcgaatctgattggtgttaaaaatatctaataaaataagctgtgcataagcctgcgtaatattggctaacgggtgctgtacaccttgaatatgattaatattggttaaatgatatttgtattgaaccgctgtttcataaagctggtgggcaattaaccattgacctttgacaggttcgctatagagcatatgctgttgatataaaagattggtcaactgctgcaatgcgtggaatgtcgccagaattcgtgcggtttgtaagtttttcttttgtttaaaagagaacaaagaaaacttctgcttttgtagctgttcgtggcttgtttgcgcaatatttaaataaatactggcaaaataacagcgcagaagcatggccagctcaataatgtgctcgttacggtcggtactaatgacaccttggttaaagaagtttttttctaaactcgccaacacattattaatggttgggtgaagtgtctgaattaagtcaaagcgtaaggtttcactacaatttaactcattcagttccaaaattgctgtaaatagcgcttttgaagtatcacccaattgcataatagaaagggtagtgacccactcattaagatctttaatgttggcttcacaaaagcttaaccgttcacgagtaagtgcggtttgattgtgaaaaatgtccgaaagcgcattattcatcatcacttattatataactcaaaaagttgtagccccaaaaagcggtgttttattcttttcgcccgcaatttccctgacgagtttaggaaccaaatatcctggtaggctcgctaacacgtcttgatatatcgcatctatttcagatggtattaaatcaaaatgttgtgcgccttttactttatctaatacatgtaagtaatatggcataacgcgagcttcaaatagacgataacttaaatcagttaaagtttgagcagaatcattcacccctttaagcaatactgcctgatttagaacagtaatgtggtgttcagatagctgcaacaattttgaacaagtaaagtcatcgagttcagaagcatggtttgagtgtaccaccagaataatacgcagcctactgttttttaataaagaaataagctcttcgtcgatacggtttggaatgacaattggaacgcgtgaatgaattctcagaatcttcacttgtttgagagatgataaacgttctaaccaaagcgctaatttacggttagaaagcgtaagagggtcacctccgcttaaaatcacttcgttaatatcggggttcgactcgatataatttttaatgtttagccaatcttcatttttaggtaaattttcctgataaggaaagtgacggcggaagcagtaacggcaatggaccgcacatgcgccggtcaaagtcagtaaaaaacgagatttatatttatgtaaaacacccggtaactgattggctgcttcttcacctaaagggtcggtgacaaactcaggatgttcctcaagttctaaatgatgtggcaacacttggagtaaaagcggatcaagaggatctttagcgttcatttttccgacgaacgcacgcggaacacgcaatttaaacttttcagaagccagaatcgcccctgataatagctgatcagtggataactcgagcaggttcaacaactctaaaggatcggtaataaggtcactgagttgtgattgccagttttgctcttggtgtaaatagtttatcatgcgacacgattaagataatgcaacagcgcattatatcgcatagttgacttgttaagtttggagtgtgccagtcatggccaattattctacaaatgatttcaagccaggccttaaggtcatgcttgatagtaacccatgttcaatcatggaaaacgaatacgtaaaaccgggtaaaggccaagcgttcaaccgtgtaaaattacgtaaccttaaaactggtaaagttttagaaaaaacttttaaatctggtgatactttagaagctgctgacatcgtagaagtagaaatgaactacctatacaacgatggcgaaatgtggcacttcatggacccagaaagcttcgaacaaattgcagctgacaaaactgcaatgggtgatgctgctaaatggttaaaagacgactcaaatgaaacatgtacaatcatgttattcaacggcgttcctttaaacgtaaatgcacctaacttcgttgtattgaaagttgttgaaactgatccgggcgtacgtggtgatacttctggcggtggcggtaagccagctaagcttgaaacaggtgcggttgttcgtgttccgttatttgttcagcaagaagaaagcgttcgtgtagatactcgtactggtgagtatttagagcgtgcataatagttaaaaaataaactattatcgaagggatgatgtcaatcatccctttttttatgcgaaagtataagaggaaaaagaacaaaggaggagtagagtcacaaggattgagcagagaacagtacataacaatataaaactgctgtaattatttattgagaggttaagaatggacacaatgcaagcgaaatctacgcttccctccaaattggtctggagcctagtagcaattataggtgctatttctttcgggatgctggcgctaagtcgtggtgaacatgttaatgcagtatggttggtactggcagctgcatgtgtgtatagcatcgcatatcgattttatagtctatttattgcaactaaagtatttgaattaaacccgagacggttaactcctgcacatcgtttagccgatggcttagactatgtgccaacaaataagtatgtactgtttggacaccactttgccgcgattgccggcgcagggccattagtcgggccgattttggctgcacaaatgggctttttaccgggcaccatctggttattggttggtgtggttctggcgggtgcggtacaagactttctagttttatttatatcaacacgccgtgatggccgttcactgggtgaaatggcaaagcaggagcttggtccttttgccggtattgtggtcatgttgggcgcacttggggtaatgattattatccttgcggtattggctttagtggttgtgaaagcacttgcacatagtccgtggggtgtctttagtattgcagccactattccaattgcattgttcatgggcgtttacatgcgctttattcgtccgggacgcattgcggaagtttcaattattggcttcgttttaatgatgctggcaattgtgtatggtggacatgttgccgcagatccatattggggtgagttcttcactttaactggaacacagctcacttggtgtctcatcatttatggttttatcgcatcggtactaccagtttggttgttattagcaccacgtgattatttatctactttccttaaaatcggggttattcttggtttggcagtcggtattgtgattgcattgcctgaccttaaaatgcctgctgttacccattttattgatggtacaggtccggttttctcaggtagcttattcccgttcttatttattaccattgcctgtggtgccatttcaggtttccatgcgctggtatcgagtggcacgacaccaaaacttgttgataatgaagtcaatatccgcatgatcggttacggcggtatgcttatggagtcttttgtcgggatcatggcgatgatctgtgcgacagtattagacccaggtgtgtactttgcgattaatgcgccagcagcagtgctcggcacaaccgtagaatctgcagcggaagctgtacgtaatctaggctttgttgttacgcctgaaatgttgacagttttagctcaagaagtgggtgaaagctcaatcctttcacgtacaggtggtgcgcctacctttgctattggtatggctcatatcatttctgaaatctttaacagccgtgccatgatggcattctggtatcactttgcgattttatttgaagcattgttcattttaactgcggtagatgcaggaacacgtgcttgtcgttttatggtgcaagacatggttggtattgttattccggcggttaaatcttcaggttcattctttggtaacttgttaggtacagccgttgcggtaggtggatggggcttcttcgtctatcaaggtgtgattgacccacttggcggcgtcaactcattatggcctctatttggtgtgggtaaccaaatgctggcttcgatggcactcattttaggtaccgtgattctgttcaaaatgaaaaaagagaagtatgtgtgggtgacgatcattccaaccattttcttgttcattacctgtatgacagcagggtggcagaagattttccacgaaaacccgaaaatcggtttcttagctcaagcacataagttctccgatgcgattgctcgcggtgaaattcttaagcctgcaaaaaccattgccgaaatgcaaactattgtgatgtcgaaccagattaatgctgcactttgtggcttctttatgattgtatcgattgtcatgattattgcctcaattggtattgttcgccgtgctttagcaagtccaacaccgactgtaaatgaagcgcctgcggtatataccgatcctgaagtggttaccactcgaggagaataaagatgaattttaaatttgcaaaaaatggtactgttattattgcgaaaatcatcaaaatgaccgtgctttcgcaaaaagagatattgctctctccaaagaactggtcacgtatcgcaaccttatggcagcgtttacagcaaagcttccgactcatggttggtgtgccggactatcaaacgtatctggagcatatgaaagcccatcatccagatttaacgcctatggatgcacaaactttctatcgacattgtgttgatgcaagatacccatctgcaggtggtaatttgaagaagtgcccttgttaagttgaccttgatatttggctaaataaagacggtatgtggttgaaccatgtaccgttttactttttgggaaatgaaaaagagtttgctcaaagtctgctcatttgtatttttttcactggtaaatcacttgttttgcttttgaaaaatgaatatgatgctttccatcttaggcgtatagctcagttggttagagcgctacgttgacatcgtagaggtctccagttcgagtctggatatgcctaccaagatttaaagtcctataaactcgaatcgctttatatgacttaaaaaagccctaaactataatggtttagggctttttttattactttgtataaacttataaaatcattaaatgcatattgcaagaaaggtgttaaaggtgcctagaattaaagagtgtattttgaatagcgaatagagataatacagtgaaccgatgagattgataggatagttgaaaatggccaaaaactggatgttcaaaggttttcttggagatgctacaccggatgatgaaatacgtgcttgtataaatcaaggcaagtttatgatcgaaattgcagaaaaaataaaaaataatgagttgttaactgatagggaaagggagtgggctgtaggtattgtgaaggctagaggtaaggaccaaataataaatccaacaaaatatatttctaaagaagagagtggagctcctccagatcctaggagatatgaagctgttctaagatattattgctatctaaaaattctaaaggtccaaagaagagcgattgaattagtttgtcattcctatgaagatataacatcagataatttaaaaagttggataaagcaagaacgagaagctggacagccaattaaaaggcaaacagacgatatgattattaataattcagaaagcataatagttagttatgaaaaaattaaagggaaaaagtaaaaaaagtttttccctattttctaaggctaccatgtgaataattaagtacatccctgttaatcatgaaaggatgtatctagatgtctaataaaattaatcaaaccagaaaaatcacttcaggtttagtaaagtcacattataaaacgctgttagacgcgctaaatttaattttgaatatcattcgtcttttgcttgaaatcatcaatattttatttctatagatctaaaactagtgcgcgacacgattagacgtattacttggctatatatattcatatataaactattttggcttatattcaaagggctaagtctaggttagtacccgaaagtctgacacccaatcagattgacttaatcatttttggggatgctttgggagcattgatatatgtcaaagatgcgagaattacagagtagagcaggaaacccggacctaagtcattggaagaataataagctattttcaatcgctgaagcagcattattaacatgtgggattgacccattagatcataatcataattttgaaaataatttagttgcagatttacagtttaaaaatgttgtaaattggagacatgctattttgcttattagagcatttaaagaagggatttgcacacatgagataaaatcaccatgtgtcctattgaatagggaggattatcatggtaacggatatacggaatcaaaagagcaatcagctttaggcataagtgatattggagatatatgtatttttggaacaagaatacatcgagataatttacatatatggcttaattataatgactattttgagcctattcagtcacatactatcagtgctcaaaactctacatatccgtcacatgagccaatacaacttaatagcattgtctcactaccagcacctatttatagaactcccgcattagatgctgtacaaggggttgttaataaattttgggttagttatgaccctgatggcaatcaaccaccaccaaaacaaatccaagttacggagtggattaaagctaactacccagatattcaggctgcagatatttgtaaatatatagataaaatttgccgtcaccccgaagcaaaaaaaggcgggaacactaaagtaaatcaacaaattaaaatcaaaggggttactacaaaataacaataaaaatcatattgttattttggggtcatagcactatttaaagagtgctgttatccctttggtacttcattaccccaatatatttttgatctccttactccatacaaacacaactgtatggagctaaataaatgcaacctattcgagttatttataaccaagcatatgaattattaagtactaaacataatactttaggtcagcctaatttgaatgaaccgattttctctaaagaggagagagtggtcgtagatatttcaaatcctcatgctttacgccgtgctcttttggactatacagagcaagtaattcatcttgaaactcagaaccagtgtttagagcgaacgatcgacaccattactcaaacacctgcaggagtgaaatttcagcaagcatgcaagatcttaaatattaaaagacaagtattagctagctggctgcgacaaaatggttgggatcgtcatcttaataatatgcgtacttcaacatactatagtcaggcacgtgggtattgtgaaaccaaatatgaaaaggtgattcgggttcgtcctaacggtgaacagtatactttcactatgatagagttttttattcttcctaaggggatgacgattttagctaaagcttttggtaaggatacctaagataatgaactttatagttgcatggcagaaaagataaggcactgtgaatgagtgggaatcttttaaaagaggttctcacctttataaacccagatttaacaataactatctcattatttagccttacttttttaatgatctaatttaaaacaaatgtcattttgtgtgcttgactgctaaagagcagagcactatcctttgcctgctggccacattgccaggcagttttgacagactgctcatgaacttccgcatcagagttattctttctgaggtataactttgtgtggtgactactcgtccctttgccgtagcggtaggacgggagagggacaccttcgggtgtgctagtctgagttcatgctagtctgtcaaccttcttccgttctgccaccataattctataaatgtctggcagaactcccaataaaaaggagttggctttgcacatccattatttcttggcagcctttgccaaaagctataacgacacagcttaaaaatttaaagcagcttgatgacctttagggttttcaggctttaagtcattacagctcaaaaaacttgcattaacaataaaacttgagatgtgccaagcacagtcttacggctttgctatgccttttttctccccaaaaagtatctcgtttagaaacaacaagaatttataacggtaaaaatatgccacattcagatctctcatttcgtgctttaagtgtgcttcatacctctcgatatctttttaataaatatggctttcacaaagtcggggttgaccgaattattgaatcttcaaaaacgcctaaagccactttttataattattttcactcaaaagaacgcctcattgaaatgagtctcacttttcaaaaagatggccttaaacacgaggtgctttccattattaatgttcaaaaagatttaaccgtaattgaaaaatttcgcaaaatttattatttacatgccgacttagatggactttaccatttgccatttaaagctatttttgaaattgcgaaaacacatccaaaggcgtatcaggtagtcgttgaatatcgaaattggcttattaatgaaatctataatttgcttttaaccaccaatgccaatgctgcaaaacaagatgcacatatgttcttatttgtgattgatggggcgatggttcaacttttagaccccaataagcaagatgaaagggagaggttacttgagtattttttgctggggtttatttaagccaaataaaaagtttaaagaaataagaattatttatttctatttaagtaccaccgtttcataaagagtttagcttttttcaatttttatatcgtaaaactacgtaaaacaaaaactaatttttgttgaacggtggttatctttaatttctttgaaaaactagatatagaaaggctttgactgaatttttaagccttgagtttgtccaactacgtcaaacaaaagtttagagttgaaggggaataattttgttttacaatcctagaaaggagaagtggttctaaaccttgagatataagcatttaaatgttttctttattgttgtgttcagagaaaaattaatttttatatgaaatcattactttactggttaataagattacgctcgggggagagagtaatcttataaaaaagaatcacaatataaggattttaattaagaatcctgtaacaatcctatggtttttgctgcttctaaagctatccaaaaccgtgtaatacctaagcttgttgtgggctttatgccagttaattcttctataactttcaatctatagactagtgtctgccgatgaatatctaatttagaagcggttaccttccaattgccatcatattttaaaaatacagctagggttttgagcaatggtagggagttagtttgttcatattctagaatacggccaaaataatgaccaacaacagctcttgcttctgcaacagttttaggacctaaggctagttctagatctaggtggttgtagtgaattaggtcggtttggctttctttgattcttcctaaagctaaacatgactgaaaaatactttctttgaaaccaagcattgctgtaattggactacttatacctatttttgttccttttccaaaataattaataagcgcatttaataaattactatcgtcaggaagtactgcaaatattctattttcatcacgagaaaataatggataaattttataaaattcaggtatatggtgaatgtctgtgtattggcgagatcctttgtttgatggatcaatggctatagtgactaatttacctagtaagccacgtctttctaacataatttttgcagcgccaaattcaatttccccatttaacaaatcatcgaataaagcctcaccttcttctcgaattccgtcacggtctatcatttcacgttctagctcaatactaagtaagccagctaatatgcggggtaaaaatgtctcatcaaaaaaacgtgactctttattaataatatttagagtagtttgggttctacccggtattttcacactatagggaacattatctttttgtaccggagtactaaaattaaaaataggggtgagtgtttcattatctaagatttgtaaatttaaagataacttttgcccgataatctgtaatcgttcatctaattgtgaactttcccataacgcatcagtatagacttgaaatagcttatttcctgcgtcaaaacggtctctttgagcttgcaaaacgctctcaattaccaaacgggctaatcttaaaaactctaaatcaaaactagcccctaatattggaaatcctaaatcagttgcttcatctagcatctcttgagttatagaaggtgcaaaatctctaggggcaataacaagggcactagcttgagcttcagcgagctgacgtaaccattcaatctgttcaaagggttcagttggtaaaccaccaccagtggtcattacgagggtgccaggtgatatccaatgccaaggatctggtaaatctacagcatgagcccatttaactatacgtttacctcctgatctaccagacttaaaagttaggcctaaattattgtttttcaccaattcatcaatggtaatcataagcatcctgcttttttcatcatacatttgtataaaagatagcagtttttatgcttatcttaccaatagaatcgtgtttgacatgggcttaacatcctcaatcaatactaaaaatgtttgaggaataataaatgaatgaagcacttagggatgagctcatcaaattaccaaatattccatattggtatgaaagaactgatgaaagaccatcgttaaatactgagattgatgctgatgtagtcattatcggagctggttacacaggcttgtggactgcgtattacttacttaaaacgtcaccttctcttagagttgtgattctagagcgtgaatatgccggatttggagcatcaggtcgtaatggaggttgggcttctgccatatttccaatttcattatctaaagtagcaaaaaattcatctcatcaaagtgcgctatttttacagcaagtaatgaatgagacagtagatgaaattggtcaaattcttcaattggaaggtattgatgccaattattctaaagatggctttttatccatagctcgaacacaggctcaactacagcgtgcaaaatcttcagttaaggcttcgaaagattttggtctacctgatcaatggtattttcttgatgccaaagctacaaaatcaaagattaatgtagctaatgcattgggtgcaatttatacaccgcattgcgctgtaattcatccaggtaagcttgttagaggattggctaaaactgtagaaaaattaggagctaaaatttatgagaaaagtgctgtaacgaaaataaactcgggccaagttacgaccttaaatggaaaagttaaagcccctattattgtaaaggctacagaaagttattcatgtcaattagatggatacaaacgttcaattattcctttgtattcattagtgctagccacagaaccaattcctgtatctgtaagaaatgatcttaagctaaaccataggttagcttttaatgatatgaggcatttgcgtgtatatgcgcaaatgactgctgatgggagattgatttttggtgggcgcggtgctccttatcattatggttcaacaatttcacccgagtttgatctagttgataacgttcatgaaagtatccgtagcactattaatgattttttcccaacgttaagaagtttaaaaataactcatcgatggggtggagcacttggcgtcgcccgtgattggtcaccatctgtaggttttgatccgaatactggcattgcttggggtggtcattatgtaggtgatggtgtcgcgatgagtaacctttcgggacgaattctcaaaaatttaattctaaatattcaagaaccaattaataagctaccaatcgtaaatcatgcttctcctttatgggaacctgagcctttacgttggatgggaattaattttggtttatctgcaacggcgttcgcagataaagaagaaaacatgactaatcgtccttctactgttgcatctgcactagaagcattgactggcgctcattaattttaaaggagtaaatacatgacaactatgactattgttaagcgcgatgaaattgaaaacggcaatttacctgctgcaggtttgcgtgctggcgctgatagtggaaaccctcagttaggagttcaaactcttgcacctaatgctcaagggaatttagggatttgggagtgtcaaccaggagggtggcctgttatcgacagaaaggatactgagttttgctacatcatatctggtaaagcaactctaactgatgacaagacaggtgaggctatttctgtaagtgaaggcgatttgataattttgcctgttggctggacaggtcgttgggatgtaactgaaacagttcgaaaaatattcacaatttattaattcaatcatttccttaaggaaaagtaaggaatatatctaaagttaaggagaatcaaatgagccagatcgttggacattttatcaatggcgaagtagttgtagatgaaagtaatactcaaccagtattcaacccatcaacaggtgagatcagtaaacaagtaagtttaggtggagctaaaacaattgatgaagcagtcgcttcagctaaagcagcgtttccatcttggagtaaaacacctccactaaaacgtgctcgcatcatgtttaaatttaaagagttattagaacaaaatactgctgaaatttgccgtttaattggtgaagagcatggaaaaattattcatgatgcagcaggcgagttacaacgtggtattgagaatgtcgaatatgcatgtggcgcacctgagttattgaaaggtgagcatagtcgtaatgtcggccctaatattgattcttggagtgagtttcatcccctaggtgtagtggctggtattacaccattcaactttcctgtaatggtgccgttatggatgttcccaatggcaattgtatgtggaaacacttttgtcctaaaaccttctgagcgggatcctagcgcgactttatatattgctcagttgttaaaagaagctggtttacctgatggtgtacttaacgtagtaaatggtggcaaagaagctgttgacgctattttggttaataaagacattcaggcagtaagttttgttggttctactccaattgctgaatatatctacagaactgctacagccaatggtaaacgttgtcaagcgcttggtggtgcgaaaaaccacgcaattgttctcccggatgcagatttagacaatgtagtgaattccttactaggagctgcttttggttcttctggtgagagatgtatggctctatctgtcgcagttgctgttggtgatgaaattgctgacagaatgattgcagctttaaaagaggcaatggcaaatttaaaagttggtattcattcagataaacaaaatgatttcggacctgtaattactgcagaacataaaactaaagttattggacatatcaaaagtgcagaacagcaaggagctactatttgtgtagatggctcaaatctcgtccatgcagattatgaaaatggtttttatgtcggggctacattgatcgatggtgttaccaaagacatgagtagttatcaggcagagattttcggtcctgtactgcaggttatgcgtgttaagacaatgcaggaagcaatggatctaatcaatgaacatgagtatgggaatggtacctgtatttatactagagatggggaagctgctcgttattttgcagataacatacaagttggtatggttggtattaatattccactgcctgtaccagtagcttatcaaagtttcggtggttggaagcgttcattatttggtgatttatttatgtatggtccagatggcgtacgtttcttcactcgccgtaagactatcactcagcgttggccaactgcacaaatccgagagggtgctcaattttcaatgcctaccttatagtttgagtaataataaaaagatagcttaatggcttaaacctcaaggggtttaagccatttttcttaaattaaataaacattttctactttcccattattgagagaattctaaactagagctatatagctctttcctgtaaacggtaatggataaaatatcgtaactcttatgaggtcgttgcttattatgcaaacgctataacaatactatttctctaacctatggtaagggttttcaaataaacaagtattgaaaaataccttcctgaatgaatcatagaatcatttaataaaagcattttttgtagctggcttaattatatgtactaattctttttatcttggcacaactctagcaatttggctgagtgcaactcaggattattattaatattaagctaccttggaaaggtcacattactgcttaagtagttctagtagtccttaattacacgttcaaccagcaaaaaagtatctatttcaaggttagtattcatgaatacttttatcgataatattcagaactcagaagcaattatcacaatatagactgtcatccatagcatctaaagcctactgatagttttccattacagctacttgtaccagtcgctttgataattctcgcttctagaggttaaacaaatttaagtccattagacaatacaccagatagacctgcttatgatttcagtcataaccatgacgatgaatactactaaaacatttccacaatagtgattgaggagattgtttaagtacatttgaatagcttacttaggggaaggagacagttgcggtcataagtttttatatctaagtatagtgttaattattgatttacaaattaaaatctcggtattgttataccgagatttattaaattaagtatagaaggtaattacgattatttagtatgtcttaagggattaacttgtgggacatgtgatgccttattagggctaacaattttcatagcgccgtatgcaattacaataacaaagattgcaattaaggactgtaataagctaagtcgtgtagctggattgatccccatactaactaaaacagcgacgatgcagagagttacaaataacggtaaccaagggtgcaaccacatcttaaaggttagagttccttcctgtacccattttttacgtaactttaactgtgataagcaaatcatcaaatagataaataagaatagagcaccagaggagtcaagtaaaaattggaatgcagtgtctggccacaatgccgcaattacaacacatccatacccgaccaaagtagaggtgagtacaccccaaactggtacaccacgcttattttttctagctaaccaacttggagcttcattatttgaacttaatacatgcagtaaacgagatgcagtgtataaacctgcgttcagtacagataatacagcaacaagaattactactgtcagcattgtaccagcaccaggaataccaattttttcaagtgttgctacgaaaggtgatttccctggaattatattagtccaaggttgtgcaacaacaatgaacagtgtcgataaaacgaaaaagactaagatccgcgccattacagtatttacggcacgacgaatgttttgtgaaggattatcggattcagcagcagcgatagtagcaacttctactccactcattgagaaaattactgaaactacaccagagaatagcgctaatgtgccatggggcaagaaaccgccatgctgagttaaattagaaaaagaggctgttgaatttggccatactttaaatacatatgcaccaacgataaccaagaatacaacaatagctgctactttaatgcccgcaaaccaatattctgcttcaccaaaagaacttactgataataagttgagggaggtcatcaagattagcaggccaagtgagataacccaaacaggaatatctggtaaccactgattaataatttgaccaccaacgacagcttcaaagccaacgacaactacccagaaataccaataaagccatccagttgaaaagcctgcgagattgccgaaagctaatctagagaaatctacaaatgagccagtggaagggcgagctgccgccatttctcctagcattctcataattaaacctaccataattcctgtaatagcgtagcagatgaaggctgctggacctgctgcagctattactgaactggaaccgacaaataagccagcaccaatcacaccacctaaagctaacatgctaatgtggcgggttttgagtgtagatttcagacgtggatcatgttccgtatgaataggcatcttttacttcctctatgattatagttttaactccatttgagggaatataagcattactgcaacagattgcctatatgtaaaaaagatgaatttatatggtccatttgtataaatgtatgaaaggttttcttatagataatttaagtaataaaagtaaaatgtataaagagtaacttgttgatagtaaatagttagtaattttaataaataattctgcttcgacgagccacttattgtaacttattcttaatctaaaaatttaaacatttgagcgacatgtttagcaatagctccaatagctttactaccctgactatattcaaaaatatccaaaaaattagaaaaaagaaaagaattttgttttacgagctaactttagagtgaacttaaggctttgagggctagctgtttaagtgcttttaaattctttttttaaactatataaaataaaaaacgcgtagttaccttttttctatttatcattattctcaattaattagattcaaatgagaaaaactcatggattgaatacttttactcactttttattaaattatatttatgagattttagggctttcctgagaaatggatcataattgaataaatttaaaccatttataacgagaatatctggtttattcgctattagtatgttcaaaagacaattttcatattaaatagcggaataaaagaactcgagttggaaaagagtttttaggaaatgggacaaattaggagtgtccatgaaaattaagccattgccgccaatgaacagcttaattgtattcgaggcagccgcacgccacctcagttttacaaaagctgcaaatgaattgaatgttactcaaggcgctatcagtcgacaaattcgacagctcgaagaatacctaggtaaggaattattccttagagctaatcgaaatatttccctaactcctaccggattgcaatattatcaaacgatttatagtgctttattagatgttgctcaagctactgctgaaattaagaaatggcaaggagagcatcaaataactgtggctacgacaaatgctatggctgctctttggttactaccgaaagtagctgcttttcaacagaataatgaaggcgttgatttaagaattttaacgacagacaatatttcagatttgcacaaaatggacttcgatctggcattattttattgccgtgtccctccagcaggaatgagagttactactttatttcctgaagaggtttttcctgtttgtagtccaaattatcttgctcagtttaaggaagatagttctccagaagaaatttttggcaaagctttactatacttagatgacgctcaaaaggattggattacatgggcagagtggtttgaagctgtaaactatcctattgtaaaaccgaaaaatagggtgaatatcaataactatccaatgcttttacaagccgcaattaatggtcagggagtagctttggcatggggttcactcgtagacgattatttacaaagtggtgctttagttagacctgttgaaactgttcttcgtactcaagcaaatttcagtatgctagaaccagcagataggggagttattccttctagtgttaagcatttccgtagttggttattagatcaactaccaggacaagtgggacaaaaaggcttaagttaattaactaaagagtggtatagagtacttgaattaccgatctttaatatacttattgtgattaacacctaaaaattattaattctttcttagaaaaattaataatagaaagagagtaatttttaattactctctttctattaaatagaatattcaagtagctttaatattctattttacatctggatgcttcggtacgatattaatggttgagatatcttcttgatgaagagctttaaataatgttacacagataattgttaacaggataaccatagggaatccaaatagaacaattgctgtttgaattgtttttaaacctcctacatataataaccctgcactaattaaagtaataaatacactccaaattaaacgtatacgaataggggtatccttatctgatcttgtatctaaaaagcaaagtacatgtgtcccagagtcttgcgaggtaacaagataagtaataagtaatatacaagttgtaatgcttaatagtgtccctaatagtccgccatcaattgcatcaaaaagagcaaatacagctaatgtattatcttttttcacagtttggacaatagggcctccttcgaaaactgtagtagagggagttatttctttgctagaagaaacttctattttttttgatgattctgaagtaggttctgcagtttttattagagcagcttgttgtttttcaaaactatgacgagaatcttgctcaattttaagggcagaaccaccaaaaacagccatccatagaaaagtgatgagagatggtacgatgagtacgccaccaataagttgtcggaaagtacgaccacgtgatatttttgcaatgaacattcctacaaaaggtacccatgttgcccaccatacccaatagaatgctgtccaccagttctgccattctgtatctttctgggtatcactccacaaactcattccaataaagttttgtgtataattcccaataccttctaaataagtattagtgatgtaacgtgctggaccaatacacattaaaataattactaaaataattgatagaataatattcaattcagacaatcttcgcataccagtaccaatgccacgaactacagaaaatgtagcgatacttgataaacaaaataaaattataaattgtgtagtagttccaatatttatgccaaaaaccttatgaagacctgcattaatctgtaaaactccaatggcaagcgcttgagaaattccaaatgttgtaatcacgataacaagaatgtcaacaaaatgcccgattggtccataaatcttattaccaattaaaggatataaagctgaacgtaaggaaaagggtagatctttgcgatatgaaaaatatccgatcgctaaggcagcaatacagtacagtgcccaagcatgtaatccccaatggaaaaaggtaagttggatagccatacttgctgcttcatcagttaacccttttgtaaatggattagtcgtataatgattaatgggttcagcaacaccccaaaaaacaagccctacacccatagcacatgaaaataacatggaaatccaagcaaagaagctatattctggtttatcgtcatctttaccaaatttaagtaaaccatatcggctacccatgagataaagtaagaaaaacacaaaacctgtagtacttgctagaataaaccatttcatattttccagaatgatcccagaaatatatgcaaaaatttttcctgcttgatctgaatagattgcgcaaaataaaataaaaataagaaccaatacttttgaaataatagagacgactgtgttagccccaacaacatctgtggcacgcatatatcctccttggatattaattattaactaacttccctgtgtgatttataagataatcagttagacgttacttctgatttattagattagttaagagtaatattttatagatactctctgtctatttaaaaatataaaaatagtctttagatttcaaaggagttattagcatgagttaatgagaaaatctcatgctataaaataatgaaatatgactttaaactttaataaaaaaagagattactaaaatctcttttttattaccttacttttcaataattacttgaagtgaacttttttcagggggactttcctctaatgaatcattcttaggccgtgcatgttctggtaataacatacatgcttgaggttctctacgtaaatttttaaataaagtaacactcataattgccaggaagatagctatgggaaagccagcaataatagacgcagattgaatggcttttaaacccccagcataaagtaatacgccagccagaatggcaataagtgagccccagacgatccgaattttaattggtgtttccgtagctccttctgcgtccatataacataatacatgtgtaccacaatcggttgatgtaataaggaatgtcgccagtaataagcaggtaatgatactaagagctttaccgagtgtaccactatcaatattatcaaacattgtaaaaagcgcacgagtattatcagcttgagtcgcttttactattggcccacctgtaaatggttctggagctggctcaccagctttaactaaagcagcagcatgtttttcataagcatgacgagcatcttgttctacttttagagctgatcctcctactacagacatccatatagctgttacaagtgtaggaacaataagtacgcctgcaataagttctcgaatggtacgtccacgagaaatacgagcaataaacatacctacaaaaggcccccatgtcatccaccatggccagtagaaagctgtccaccaattttgccagccagaatctttttgagcatcactccataagctcatgcttataagattttgtgtatagttacctgtagcctcaaataaggtattaaataaataacgagtaggtccaataataagtaaaatagctatcaatagaatagctaaaatcatattaagctcagatagtctttgcattcctctattaatacccatgactactgaaatagttgctattccacataaaatagtcagcatgataaattgtaagcttaaactattctcaaaaccaaaaacttgattaagtccagaattaatttgaagtacgctcatgctaagggattgagcaaccccaaaagctgtaataacaattgttaaaatatcaactgtatggccaataggtccgtaaatgcggtttccgataattggatataaaattgagcgtaaactaaatggaagacctttacgataagagaaataagcaagagctaaagcggtgatacaaaatatagcccatggatgcaaaccccaatggaaaaaagtcagttgcatagccatactagcggactcatcacttaaccctggtgtaaaagggttgctagcgtagtgccacataggttcagctgccgaccaaaatactagtccgacccccatgccacctgaaaacaacatagaaatccagccagtaaaggtaaactctggtttttcattatcttttccaagccgtatgtgagcgaaacgacctatcattaaataaaataaaaaacctaaaatagctgttaataaaccaaggtaaaaccatttaacattttgaagtaaaatgccagaaaccatttcaaaggctttacctgcttgttccgcttgtaagacacagaataaaacaaaagagataactaatattttagaagcgacagtcactgtcggattaagtcctttaaagactcctgatgtagctcgcatgactcctccttggattgcgcacaggcagctaatagttttagctgtatctggaagcccaacagattagagaagtggttaaagatttttcaatcgacttattctcactaaggaatgacaaaaagtcatgcttagcagtttctaaaaaattattaagcattttaagaatttttaatcattacaaaaactcattgatgccgcgcaaaaaagtcgtttgtcgactaatgcaatatttaacacaatctcctaagaaacagcagagtgtgcaaatcatctcaacgcagggagttctgcgttagttttaaatatatggagatcatcagatgaatagtcgagttagccagcaattaattacggttcagcaagtcgataatgttttgaaccctattactgaatcaaatggtatgccaaatttagcatataccagtaatgaatattttaattttgaacgtgacaatattttaagtaaaacttgggtatgtgttggttttgcttcagatttacctaaaaagagctatgtgaagcctgttaattttatgggcatgccattggtaatgatgcgcaacaaagaaggggaactacatgttttccataatgtttgtagccatcgcggtatgattctagtgcaacaagaaggcactattgagggtgtgattcgttgccagtaccactcttggagttacgacttaaacggtaacttaaaaggtactccacatgttggtggaattaaccagcataaagatgagcgttttaaatgtgaaaagcatggcttaaaagctctccgttcagcagtttggatggatatggttttcgtaaatatttctggtgatgctcctacttttgaagagcatattgcgccactagttgaacgttggaagccattcttgggcgaaaacgggttagagcttattcgtagcagtaaagtaggttcaacttttgagttacctgtaaaaagtaactggaaacttacagttgaaaactattgcgaagcttatcacttgccatgggtacatccagcattaaatacgtattcaaaacttgaagatcattacaacattatgttcgaagatcgctttgctggtcagggcagttataaatataacttgtcagctactgcgggtacgcatttaccaaaattcccaagctggccagaagatcaattgcgtcatgcggaatatgtagctgtgttcccgaacgtattgttaggtattcaagctgatcatgcatttgcaatgatgattgatccaattgctccagaacaaacaattgaaaaattacgcctctattacgttggtgatgagtcacttgaccctaaatatgatgcatgccgtgaagcaactttagaatcatggaaagtcgtatttgctgaagatgtgtttgcagtagaaaccatgcaaaaaggtcgtcattcacctggctttggtggtggagttttctctccagagatggatttaccgactcacttcttccaaaaatggttggcgactcaagctaaaaaagctttggaggcataatatgcaacactacctcaactacgttgatggccaatggcgagatgcttctcgccaattggaagttatcaatccagcaactgacaaagcttttgcgacagtggctcgtgcaagtattgaagatgcagatgctgcaatggctgcagcacgtcgatgtgtgaatagcggagctttaacagatgtgcgtcctgcgaagcgcactgcatggatgttaaaagctgcagaagcgattcgtgaaattgctgaagagggtgcattaatcctatgtcgtgaaaatggcaaaaatattgatactgcacgtgaagagttcgatgaagccgctcgctattttgaatactacgcaggtatggcagataaagttgaaggtatctcggtacctttaggtaaagattatgtcgacttcacctcatatattccaatgggtgtatcggttcaaatcgtaccttggaactttcctgtttcgatctgtgcacgttcattagcacctgctttagcggctggtaatgcggttgtaattaagtcacctgaagtttcacctttaggaatggttttactcatcaaagctattgagaaagctggttttccccaaggtgcagtgaacttactttgtggtaaaggttcagaagttggtactcatcttgttaagcatcaagatacgaatcaaatcgtatttaccggttcagtaccaacaggacaacgcattttgaaagatgcggctgaacgtgcaacaccttcagttatggagttaggtggtaagtcagctgcaattgcttttgctgatgttgatcttgagcaattactgcgtagcgttaaattaggaattttctataactctggccaagtttgctcagcgatgtctcgcttattagtgcaccgcagtcgctatgaagaagttaaagcagctgttgtgaatcttgctgagagcctaactgtaggtattggcgaaagtaatgccgaacttactccagttgtatctaaagatcagcaacaacaaattcttgccatgattgataaggcacgtgaagaaggtgccaatgttttaacaggcgggaaagcagcagatttagaaggttactttgtactacctactattatcgaagcaacagccgatatgtctattgctcaagaagaagtttttggacctgtaatggtgatcatgccattcgatgacgaagaccaggccgttgcaatcgcaaatggtacggactttggacttgttgcaggtgtatttggtgaaaatctgaatcaaacacttcgagtagcaaaccgacttattgctggccaagtctttattaacgaatggtttgctggtggtattgaaacaccatttggtggtgtgggcttatctggttttggtcgcgaaaaagggcaggaagccatctacagttatgttcaaactcgcaatatcggtatccgtttgaaacatagcgtgtaatttgtaagaaataagggaaatagacaagatgagaaagtggttatgtattgtctgtggctggatctatgatgaagctaaaggctggcctgctgatgggatagcaccagggacaaaatgggaagacatcccagatgactggatgtgtccagagtgtcaggtgggtaaagctgatttcgaaatgcttgatatcacagatattgaagaggacgaaatccctcaagtagcagccgctgcagttattgaaccagttgttattattggtagtggccatgctggctatcatgtagcttcgaatttacgtgcacaatctccagacttgtctattaccgtatttactgctgatgatggcgccttatatagcaaaccagctttatctaatgcactagcattaggtaaagacggagatagtctagttcgtgaatctgctcttagttgggagcaacgtttaaatatccgtgtttatccacatacgaaagtgactcatattgaccgcgccaataaaaagcttcaaaccactattggtgattactcttatgggaaattggtgatagcaactggtgcaacgccaattgttatacctattgaaggtgattcgtctgcaacattaagcgtaaatgatctggcagattaccgtcgtttccgtcagcaattggcagataaaaaacatgtcaccattcttggtgatggtctaatcggctgtgaatttgctaatgatttagctgcacatgggattaaagttactgtcgtcggacttggtaaatgggcaatggaacgtcttattccagaacctttaggtcatgctctacaaaatgcgcttagccagttaggagtagagtggaaattacaaaatagtatccgctctattcaatctgcaaatggttgttatcagttaacactacaagatggccaaataattgaaactgatttggtattaagtgcagtaggtttaagaccaaatattgctcttgctcaagaagcaggtctagagacagcacgtggtatctgtactggtctggatcatcgtagtagtgatccttcaatttttgctttaggtgactgtgcagaagtgaacggacaatgggcaccatatatcaatccaatcactcaagcactacctgctttagttaataatcttttaggtcaatcaactgacgcagatctgaaagcgaccccagttttagtaaaaaccccaattttgccactttctgtattgccagcaatggaaacaggtgagtggagagtggaagagcacgatggggagttggcggctggtttttacaatgagcaagataaattaataggctttgccttactcggtcgtcaattacaacaccatcgtactgaatggcttgagaaattaaattcgtgcccatccacagtttaagttaaaggaataacaaaatgattgctttaccaaatgatgataatacttgtgggtggtatgcagcattgcctccagccggtcctgctaaaaagttaataggtctacaaaaagctgactatgccattattggagcaggctttgcaggattggcagcagctcgaagattagctgaactcaaaccgcatgcccgtattattctagttgatgcacaacgtgtagctgaaggtgcttctggtcgtaactcagggtttgtaattgatttaccacataagtttgcattatcgcatcctgacccttctcataagcaaaagttattaagtctgaatcgttcagcaattgctcagttacaaggcctagtagagcgctataacattgattgtcaatggtctgcagctggtaaatatcaaggtgctgtaggtgagcgtggcgaagcacatctcaatcattttgagcatctaatgaaagatttaggtgaaccatatcgttgggttgaaaaagcagaacttaaaaaagttttaggtacagatttttatagtcgtgcgatttttactcctggttcatatttgatgcaaccagcagctttagtgcgtggtatgggtgaccacttaccagacaatgtggagttattagagcaatcaccaattcgtagtttgcaaaaaagtaataaccaatggctattacagggtgaccatgggtcaatcacaacaccgaaagtattgctggcaactagtatttttactcgtgaatttggttatttgaagaaccgtttattaccagttatgacctttgcgagctggacgcgtccattaactgaccaagagatgaaagtttatcagggtgagttagattgggggcttactccagctgatcatgctgggacaacgttaagaatgacagctgatcgccgtattctaatccgtaacacttataagcatgtcccaaaatacggtgcaaatgtaagtgatgataatcgtcgttggatacaagaagatcatcgcaaggcatttttagctcgttatccgaatttagctaatgttccatttacccatacatggggtggtgtttatgcgatttctcgtaatttcactaacttctttggggagttagaagaaggcgtttatgcgagtgcttgcgacaatggtgtaggagcagcatggggcacaatttcaggaacgttattggctgatctcgttgttggctcagattcccaagctttaaaagatattcagtatgtaactggtatgcctagtttaaatccaccagaaccgttcttaggtttaggtgttagaacacgtatcagatttgaaaaatggcgcagtcgtagtgaattgtaagcgggagaaatagatgaaagaagtaaagttagttgatagcgctcaacttaatttcaatttacgtggcgaaacaccagatggtacggcttatgttgcaagagcattaggagctgatgtttccccaaatatgggtattggttttgcacgttgggaaggggcagaggtaagttggaaattactttatgacgaagtcatttttgtaattgaaggctgttttgagcttactgctaacggtcaaaaatatgaagttcgtccaggacaaatgttgtggattcctgaaggaaccgagctaatttatggtggacatgcggtatttggttacgtagtacatccaggtaactggaaagagctgcacggaattgcataaaagaaacgacccatattgttcaggaaaaaataatgtgggtcattttattcttatgagaacgtagctttgaattagggctaatacaaattaacgaaaattttaaatttcaggagcttctcctgaacagggaagtgttgtctgaaaaaaataagcagaggacaggaaaggttttctgcaaatcttcatttaaacaaggatttgtaaatgagcaaggtctatttaacacttggatttgggttaatttcagttggaatggcgttacctgcttttgccggagtaacttttggagatcctaaaagtgatacgggtgctttaacaatttcaggtgctttacgtgggaattatcaagataaggattacggcgagtctgcatcagatcagaaaataaaatttgatgcagctattttaaggctaggttatgagtcacccgactggtttggaaaagtcgaatatcgttgttatcaatacgataaattctgtgatttctcgactctagtttatggctatgctggctaccatttaaacgcgacagatcatattactgtaggtgtgcaacccattcctttcggtccaggtcgtttttgggatagcagcttttatgctggtattaacaacacaatgggtttgcaagatgcttccaatttaggtgcgaactatcactttgaattaccgtctgctactaaagtagatttggcttattttgcaactgatggtggtaactaccacggaagtagtaaagactcagcacgttatacggctaatgttgttacctcatctgatccactcaaaacaaacctgaatgaaaaaaacatgtggatggcacgtgtcgatcaagatcttaagtttttaagtacagatgatctcaaagtatcggtggggggaagttattggtattcagacattgagaataaaaaaacttctgcagatggtacgagaaatacatgggcgctatttaaccgtattaactataaaaatctgaatgtcgtgcttactggagggcgacaatcgattagtaataaagatgcattaagtccagctagctcaactttcggttcttttgatggcgaatatgacattgcgaacaaaggatatttctatactgttgatacgagctatgtttttaagaatgttaaagattcgctcaatgttacgccgtatgttgtttttagtggttttaacaagaaagaaaatggatttgatgactctcagcgcaacattgttggagtggcgtgggactataaaaatatttctttatataccgaatatgtgatgagtaaaaacgatccgtttgttggcggcaatggtagttctcttgcagcaggtgatgatgggaagtggaacaaactcctcaatctaatgttgatttatagcttctaaaagtttgtacaggtttttcatttatcaattttcaggaagtttaaaagcttcctgaagccgtttaggaataataaaaatgtcttcaccatttattagtacatttattttatttttctcattacttaatccattcctcatgagtatctatatgattgggctaatccgtcatacagaaaccagagtatttaataaggctttgattcaaggaagcctcattgcatatgtggtatttcttttatttgcatggggtggtgaagcaatttttaatcggtacttaaatgtaaggtttgaatcatttctaatttttggtggcctgatttttctggtgattggatatcgctatgtatttcagggtgccgatactattggagaaatgcgaggagcacctgaacatttggctggcacagtagctatgccatttatgattggtcctggaacaattagtgcagctgtagttacaggcatgagtatgtctcttttagaggcggctatagtgatcgccttagtactatttgtgagctgtagtgttttgatagcaatgaaattttctcatgatcacttacgttatagccatgccaaatatattgatcgttattttgatattgtagggaggttagctgctttattaattggaacaatcgcagtcgacatgattgtaaatggtgttacacgtttgattgataaagtttgataagcgtaaacgtcacagccatatacgatggctgtgactaagaaattaggaagctaatttcgcttggttatgttgaacatggttttttcgaattgagtaccagcagattaacgatcctaaagtaaccgttaatgcaccgtaccaaaaattgattgttaaattggagttcaaaacaaaagctgagaatgccgatgagaaaattggagaaaaataagaaagcataattaaaacgggcatgttccctttgataataccaatattccaagctagataacccatagagaaaaaaacagcattaattaagacgaatatatagccattaataccttgaacatggggtaggtggaatccttgagtagagagagtaagaatccataaagctatagcagttaagataaaataaagtgatacagcattagttccattgctttgctttttggtataaatacaataaacggcccaaagaatagcagctaaaaaaatgagcaagtaactaatcggattttttgaaaagttatcaataaagtttagatttggatgatagttgataacaactatccctgcaaaacttacgatcactcctaatatggtcaataagtttactttttcttcttttaatactgccaacataataataattaaagttggccacatattaaaaataatattcatctcaatcgatttttctgatgaatttgctagagtaattgaaaaggcaaaacacaattcaaaaacaacaaaaagcaagctagataaaataagaaacttctttgaaaccttttttaaatcgggcaggccatatgttaaaaataaaataatagcactgatggtatatacataagtcactgtatagataggaccaaaactttctgtagaaagcctgagtaagccaactaaagtggaccaaagtaataaagctgaaacaccgattaaagttgagatttggcggctcatacgatagacccgattaaaaaattaatcataatttttaaataggtattttaatagttagtcgagcacgataaataatcatgagttaatgactttttatcatcattgaaaataaaaaatgaaaatatttaaaataaatttttataaaataattattatttttactttcttttaagtgtgatgagcattacaccaaaaatattaagaaaacaccctagccactggattgtatttaaatgctcatttaaaagaaagactgaaaaaagaatagtaacaattgggctaatagatgaaataatagctgattgtgttgcacctacatactctatactcaatattaataagagtgtgggtagaactgtaacaaataaacctaaacagattccgtaccaaataacttgtacaggtaaagagctaagtagttgtacaggatgactggttaccattagaaaatgtataagtgtgccaatacaagctgcagataaagatagtcccgttaagttccatgaaccaaattttttaattaatggtggggtaagtaagaggtagcaagcaaaagcaactgcactagcaaatactaagcttgctccaaaccagaagttatgttgatccggaagcgttttttgctcttggagcatcacaatgactgttcctccgtaacttaagacaagtgcaaatatcgtttttgaacttaatttttgcttgaggataaaactcgacgctaaaacggtcatagtgggatataaaaataaaataattcgctctagtgacgcggtaataaacatgagtccatagaaatcgagccagctagaaatgtaatagcctaacaagccaacagaaagtagatatagaaaatctattagcttgatattccgattttgatggcgacaaaaccaacagataactaaaaagaagggtagagcaattcccatacggatagccattaaggtaatggcatctaatgatggagtaaggctatatgcctgtttaataaaaattgctttactgctaaatagaaatgcagagataaatgcaaacaaggcaccaagttgaattaaagaaatattgagcttcatggaaccttgctgcatgaataaagagtatttttggagatgtctttaagcttctgaattttctttagaaactgagattttatagtaagcaacatcgtattcggctttcttgtaagcctcataagaagttttgctaataattactgcagattcccgacctctgcgagtaatttctacaggatgcccagcaacagcttgatccataatcatggtaagttgtgctctagcatttgaataattccactgtttcatatgtattctccctgactaaaacatcttcaagataggtgaaatgtacgcttcgcttcaatggatatattttcaagatatgatgagttttaatcatatattcaggcgatttctgctcttgatgagcaatttaaaataaagactcaaagcaaaatactctcttttttaagagaaagtattttgctttttattcagaaagtttgagttaatgaaaaatttcactcattgatttacccttggtttcaggcataaataggtaggtaattactgttgctattaagcacaccccagcagcgatccaaactgctaatgctgctccatgtgctgcaacaaacataggcatcaaaaacacacctatagcagcgcctatacgggacattgctgctgcaaaacctgtacctgaacaacttatttctgggcgtaacacttctccggggataactgaaatcatccctgcagtaatagcattagcaaatgcaaaaactaaaaaaccaatcagaatccatgtggggtgatttgcagctaaagccacaacgactaacgcaatagtacatacgaggattggaagaattgccattttacggcgcgacactctttcaattaacaatacagctgcaagtgttccaaatacagcaaatgtgttgaggaacaatcctcctttaataccgtcttgcaaacctaatttttctaaaatcattggaataaatacaccaattgcgaaataaggtgcagaagtaccaataaaatatatagaaactaaagtggtgcctttgatatttttacttttgaataaatcaaagaagcttgtcttttgtccaacatttgcatgcttctgatttaaaatatcgttcttgtcttcttcagtaaaatacttatgtgcaattctagaagcttcttctttacgtcctttactcatgagccagcgaggagattctggaataccactacgcattaataaaacgattaaagagggaattgcactaattcctaaaatcacattccaactcgcaatatgattttcaatcataataaaacttagggtatacgagacaagatatccaacaaaccaagaggtttcagtcaaaatcaataatttacctcttaggcgagctggagcaaattctgcaagcatcggccaaccgactgcatattcaattccaatcgcgacacccattaatagacgagctataaaaagcgtgtagggatcagatgcaaagaattgtccaattgagcatatgaagaatataaaaaggtcgatcatgaatagtggtttacgaccaaagcgatctgaaaaatatccaccaattggagcaccaaagaaaattccaatgagtgaggctgcaccaattaagccttgccatgtagttgataaatgcaaatcggctgtaatagagggcattaatgcacctaaataacctaaaacaaatccatcaataaacatcccgcctgccatgagccaagcgagttttgtcataaagcgacgtgctatttgatcttgggaaattaactgaggtggggaaaccacttgttgttgattcatgatacgctccttgtgtatcttccttttttgtacatatgtacttgctttagtttttatgggcgattgaggaatacttttgaatatagtgactcctcatacttcatccttctcgcgccatctttgttagtccttgagcgttattgttctattgagtaggtatatttaagacaatagaagggaataacactcattaaaaatgaatgtctaggtaactttgaagtcttaaaatttgtcttaaaacgtatatagaaatgactgttttaatttttaaaaacagtcataaatgtatagtttcttgagcttgccttatttaaatgaaaatcctgtttagtcaccccaaacagcgactggtgaacccaataaatcttcatcaacagtaataccaaggccaggtttgttagggaccatcacaccgccatcaacaatcggtgcatcaaattctgctgtgtgaatgcttaccatccctcgtgtatctaaaaggcaacgtaggtttctctcaggaatcgttgctccaagatgagcaattgctgcaaatggaatatctgaacctacagtttcttgaacacttagagaaagcccagctgcaagaccaatgtcacgatgtcggcgtgagtgagttaatcccccagctttggagatttttaaacctacaccatcaatgagatcttcagtaattgcatggattaaatcttcatcttgctggatcagttcatcaagagagaaagggacatcacaacgttgacgtaatgatttggtttcacgccatgttttacatggtgcttctaaaacaaagtcgagacctttagggagtaaacggaaaattcttaatgccatttctggtgtaaggccaccattcgcatccacaataaaaaattcacctggtttttgatcagccaaacttgctttaatacgttcagcatctaagactggaccaccttcgctatcgacagcaccaattttcactgagtgacctaaataacccagttcacgatgtttagctacattttcacgcattgcgtcaggggtgtcggcatgaatagaagaaattacaggtagtctacgaccagttgaaccacctaataattcacatacaggtaaatttaccgatttaccaaataggtcccaacacgctagatcaagtgctgatttggcatggttatgtccaacaagagcattatccatggtctcattaatacgatcgacttgacggggatctttacctaataagtgaggcgcaatttcagcaataccggcacgtgcacctaaagcgtgagatgcaatatatgttgaaccaaatggtgtactttctccccagccttctaacccgttatctgcaataatttttacgatggaagcatcgaagctacgatattcacggccacccgaaagatgatatacaccaccagagtaaggtagatcgatttgatagagctcaatacgcttaattttcatgaatatatccttgtctttaagactatttattcttggtgttactgatgacatccgtattgattagaaagaagcataagtaacaccattcacttaaatctgatctatacctcaactgatggaacagtcaaaacgagcttgcccagatgtttcttgctcagaaactcttcttgagctttagcgatttcattgaggggataagtcttagccactaatggacgaatttcatttttctcgatatatgaaatgaggttggtaaacacttcatcttcttggaatgtacagcccattaaagtcaaatcattcaaatacactgtacgtagatcgatctgcgaaataggtccagcgattgctccagcatttgcatagcgcccacctttacgtaagacttctaataaagaaggccattgtggtccaccaatcaaatcaataactacatcaatcgattctttacctaactctttaactaagtcagcattacggtcaattacacgatctgcaccacaagctaatacttcatcagctttagataatgagcaaagagcaataacttgagcaccacggcgttttgcaagctgtactgctgcagaacctacaccaccagatgcacctgtaattaatacagtttctgcacctaatccaattcggtgtagcatattttcagctgttgaataagagcagggaatagaagctaattcttcatctgtccaatctgaattgattttgtaagcttcggcagatttaactgtagcaaattgagcaaaaccgccgttacattcactaccaaaagtccagcactcataaggacgataatcaacataagcacgtaacatagtgcggacaatgactcgttcaccaatacgagatggatctacatttttaccgactgcaacgatttttccgcagcaatccgcaccttgaataaatgggaatttaagaggtgtacctgaccaagatgcatcatcatcgctaatactttcaagaccattagcaccacctgtatttgtagcttgttcatttgtcttcgagtaccaaccaatacgagtattaatatctgtattgtttacaccagctgcagaaacttgaattaaaacttcatcatctgctggggtaggaactgttacatcagtacgatattcaagctggtcaagaccaccgtgtccctttaatagcacagcatgcattttagtaggcagtaccatatgtttctcctagtgaagtagtgggtgggttgtaggttgtaataattgatgggctaacttactggctctttgaattgctgctttaccaccgattacaggagctaaggcaacggcaccttcaatgatgagcatcaaactttcagctctatctttaaaatgatcagatgaagttttagcaaattggcccattaaaaaatctagtgtgcgttgtttatgaataagcacggtctgcactatttcagtctctttatgacgatactcagctagagcacgtaaaaataaacatcctctgtcactttcttctgtgaaccagttttccaactcattaaaaacggctacccaatttggaatagagttttctttattctcaatgcattgctgtagctttctaaaaaagcgtaattctctttcctcaaggacttttaaaatcaattgttcctttgagtgaaagtgtcgataaagagttcgtggagttacctcagcttcacgaacaatctgatcaattccagttgcatgaaagccttgatagtcaaaaagtctctcggcagtattgagaatgtcttgggctttgctcatatagaaaggaggtatagtgaacgttatatttaaattaggtagtggttagcttattttcaaaggattaatttgcatgaatgcatgagaaaaagtcatggattgatagtgagttaaatttaaattaatgaaaactaaataaataataagaattttattttatatttaaggtacttgtatattaattttgaagtgcaagttaattaaaaacaaacattaattagctgacttttataatttttatattttataattataaatatggaatatatgaagttcttgcatatatttttttcaatctttttatagtgcggtttatttatgtcaaatatggaaattccctttagttcatcaatgattatccatacttcaagatatctttttgatcaacatggatttcataatgttggagtagaccgtatctctaaagagtcaaatgttagcaagatgactttttataaatacttcaaaagtaaagagaaactaattgagctgtgtcttgagtttcatcaggaaactttaatgcaacaagtaagttcaatcttaagtgcaaacttaaaaagccaaaatttagataagttaaaagaaatttattttttgcatgctgatttaaaaagtcactaccatttaatatttaaggctatattcgaaatacaaaaaatatatcctcaagctcatcgagtagttattaagtatagagaatggttaattaatataatactagaaatattattaaatattaaaagcaatgcttctattgaagaagcgagattacttatatatatcattgatagttctattatccagtcgcttataaatgatgagattgatcatagagaatatatatggagctatttctctagtaaaatttcactctaatagtaaatctgaatatgattgaatttttaatgaaaattaggaaagttctatcagtctttgtaagcccagaatcctgtaacctttaaacttttttaatggttacacctccaaaactttaccctataaaactattaccctaaccccacctttataaacccctcttaaacaataacttaatcattatttagccttacttttttaatgatctaaattaaagcaaatgtcattttgtgtgcttgactgcaataaatgtgaagcttatcctttgcctgctggccacattgccagtcggttttagcagaccgtgatgaaagatcgcatcagagttattccatctgagggatactcttatgtgtaaactcctagtctcctcccgtagcggtaggacgggagagggacacctacgggtgtgctggttatatctttcaccagtctgctaaccctttctcgttctgccaccataattttaatgctttggcagaactcccaataaaaaggagttggctttgcacatccattatttcttggcagcctttgccaaaagctataacgacaccacataaactttaaagcagtttgagggctattagcgctttcaggctttaaatcgtcacaacaaaaaacttagcaacaataaaacttgagatgtgccaagcacagtctttataggctttgctgtgcctttttttctcccaaaaaagtatctcatttacaaacaacaagaatttataacggtaaaactatgccaaatttagttctcccaacacgtgccttatacgtcgtaaataaagcaattgatctgtttcaccaccgggggttccaccttattggcgtcgacagaatagtgaaagaatcagagattacaaaagcgactttttataattattttcactctaaagaacgactcattgaaatttgcttgatggtgcaaaaagaaaagctccaagaacaagtagtcgcaatggttgagtatgatttaagtacttccgcaatcgataaactcaaaaagctttactttctacataccgatttagaagggccgtattacttattatttaaagccgtttttgaaattaaaaatagctatcccaacgcttatcaatccgcagtgcgctatagaacatggctaaaaaatgagatttatagccagcttagaacactaaaacccgatgtctcttttaccgatgccaaactatttttatatatggtggaaggcacaatcattcagcttttaagctctggtggggtaagcgagcgggagggtgtgtttgagtgttttttacgagggctaactacatgcaaatgaaaagtttagggttttgccagtagcggctaaatacgagtcataagaaagggggctgtgctgtatttatcaaaaaataacttgtttattcagcatggctcctttaaataatgaaagagaaaaacaacaatgatctctatagctgtatgagggaggacgttatttgaagttatttattgtgatatttattgccattttttcgagtattggaatcatttgcttaatcgcattactcagaaattcaaaaaattattcaccatcgggtgagcatgattattcagcttcaacacattcaccacaccaccatatttacgataacagtcaccatagttctcattcatcaaatgattgctcatcattttccgactcaggcggatgtgatgggggcggtagcagtgactaaaaagccctttcatataaaagggcttttaagcagtttaaggtaaatcaaaccagataaattggctgtcttcatttgcatgaatcacggcattatcttcaaagaccagagcatcacccgctttcacttcgtactcaccaatacgaacttcacctgaaattacatgaacgtaatttactcgttttgaagtctcaactggcagttcacgacctttttcaagtacagcagattttacctgtgcatcttggcgaatatgcattggtgcatttgcgtcagggcctgcaatcaaatgccattcgttcggttgattacgtgggtccaaactaatttgctgataatttggctcggcttcttttacatcaggaataatccagatttgtaataagtgcactggcgtatcggtgttattaatctcactatgagcaacacctgtaccggcactcataagttgccattcacctgctttaatctggccttcatttcccatggtgtcacggtgtgaaattgcaccatcaagtacacaggttaaaatttccatattgtcatgcgagtgagtgccgaaaccgttgtgggcatcgattcggtcatcattaatgactcgaagtgcacttacccccatatatttagggttataccagctaccaaacgaaaagctatgataagactctaaccagcctgctttaacatgaccacgatcttcactacgatgcaaataagcattcatgactcgatctcctcaattattatttatctcttgaggaatatgttaaacctgtggggtaaagctaaaaatagagtagatgcaacatattgttgcatttttaagatgattaagatttttataaatattcgttttaaattttagatataaaaaaagcctgtataaagcaggctttttaaaaagacattacatataaatgcctatctataaggctttaaaggaaattatagatagacattgagtttgattaagcagataaaaactccgcgtatttagaaatatcgacgttgccaccactaataataatgccgatacgtttgccttttaactcatgttttaaattacgggcagccgcaaatccaagacatcctgtcggttcaaccaccatcttcattctttcagcaaagaacttcatagcgttaatgagttcttcgtctgtgactgtcaaaatgtcatcaactttctgttgaataataggaaaggtcaatttgcctaaatattgagtttgggcgccatcggcaatggttggaggggtatcaatatgaacaatttcgccttttctaaaagacatttgcccatcatttcctagcgcaggttcaacgccatatattttgcagttcggagaaagctggcgagcagacagggcagaacctgccagtaaaccgccgccacctaaacatacaaacaggtaatctaaatcaccaacttcttcaaataactctttagcagccgtaccttgacctgcaatcacatgcggatggtcataagacggaattaatgtcagaccatttttttcagcaatctcttttccaatttttcccgatcttccgtataacggtcaaattcaacaatattgccgccgtattctcgcgttgctgccatttttgcagcaggcgcatctttaggcatgataatggttgcaggaataccaagaatttttgatgaaagcgcaatagcttgtgcatggtttcccgaagaaaaagcaactacacctgctttcttttgagtctcattaaattgtaaaagtgcattcatggcaccacgaaatttgaaagcgcctacacgctgaaaattctcacatttaaagaacacttctgcttcaaattcattgttgaccgtacgtgaagttaaaacaggggttttatttataaaatcttttatacgttcagcagcggctgcgacatcttcataatttggaagggttaaatttttcataattaaacctgattctattcaatgttttcggatgcaagatttcgtattgccaaggaaagcacaatctattgaccttgtttagataaaatatatatatttagataaaatgtctaatttattttctaatttgataacaaagagatataagattttgatttacattaagtttaaaattagataaaaagtctaaattactgtttgtgtacttcactctagggtttgaaacagtaattaagtcattaggagaaatacattgggcaatcgtgataagcatttactcactcaacttgatactatcgcgaaagggttaagtgaaacactagcgcctttttgtgaagtggttgtccatgacttaaccaatcctgagcatgccatactttcaatacacaataatttatctggccgaaaagttggagatccggcaactgagttggggctggcaagaatcatgtctccggagtttccaaaccttattacaaactatgctaaccagtttgcagatggtcgccctgcaaaaagcacctcgatcggcattaaagatgaagagggccagtacgtagccgctttatgtatgaatattgatttaaccttatttagagggatgcaaagcactttagagcatttcactaaaattgaaactgacagcattattgaaaacttggaaccgaatggcacggaagcaattcgaagatatatcgatcagtttgcttcaaaacatgccactacaccgcgtatgttaaaactcaatgagagaaagcaattaatacaagaactcaaaaataatggcttactagaaattaaaaaggcggtggaaacggttgcccaacatttaggtatatccagagccagtgcctatttgtatgtaaaagaaacttaatttgccaaatcgaggtcatcatattcgttcaaggtcttaccttgctgaatatgttcctgataatgttgagcgcgcagtttgtctaactctgaacttgatacgccatctctccagtagccagcaatgcgcacgtcatttttatttaagtgttgatcttctagaaaaaattgacgtaaggctcttgcttcgttgcgttcgcaagctgcccaaatcgtaatattttcataattttctagcgcaaatgctgcttttaaaagaagacctttttgtgccgtgtgatgttctttatggaacgaatgaattttgacatgctcaagttcgggtaattggctagcaatgtctttttcaaaactttcaatgaaaatatccgcacttatgccgagttcccattgcttaagtattgaatataacgcgggtacagccgtatcgtcggcaaacatgaccacatgctttttggctgtgaaattgggaatgaaatgggggcggggaccaataagcccgatttttgtacccacttgagccgaattaagccattccattgctgggcttaaatcttcatgtttaacaaaatcaatttcgatttgagcatttacagggttaaatgaacggaccgtatagacgcgtgaaatgggttgtccctctggcggattgttcacaattaaccgaattgccaaattgggagcttgccaaagctctggttgtaatgtgttgatttttccttgaattcttacaatagaaggatacggcgtctgaatcgagacaatagtcatctcaagctgttccatatcttgtaaatggtctttttcttttagtaagtcgccatattcttgtttcgatttttctgcaatttttgtcatatatataacccaagcttaatgattactatagagcgcgataattgatatagatgtgatctctctatggctacgataacgaagttagctcttaatgtaaataataatcattattaattgtgtgttttagacgatagagttagttctctaaacaattaaatcgaatagcaaaaattattttattattttgatatttatcattttttattaatggcttttaaaagaaagaaattgatatttctcttaatagtaattgtaaatgattatcatttatattattgtgctggggtatctattattcaaacaaacagcaatgaaaacgacatttttataactttgttttgaatattaggttgggtggtattgcataaagaatagggtgaggaccaagataaatgctaaaagatttgagtcaaaatttagggcaaatgaatgataaaaataacaatgtagaaaatttcttaaagcaaatttatgaaaatatttttgatcaaaattccaatcgaacagcactcatttttgaaaaccgtagcattagttatgctgaggtagggactcaggtcgccaaggttatgtatgcgctaaaaatgcaagacttggcaacagggtcggtggttgcaatttgtctgagaaaaagtcctgagcatatttataccgctttagcatgtgcgctcactggcatcatttggctacctgtagatatggattctccgccgtcgcgactgaactatttattgacgaatagtcgggcagatgttgtggtgagtgactcatccattgcaggtgtgcaaacattaaatattaacgaaattttatcggctacaactgagtatgaaccgagctttaacgccgaaattaaccgacttccggcatattatttatatacttcgggaagtacaggaactccgaaatgtgtggtcttaaataatcaagccacagaaaacacgctacaacagacgatctcggaatggaaaattactgctgacgatgtgattatggcggtaacaccgtttcatcatgatatgtcggtatttgatgtatttgcttcaatggcagtgggtgcaactttggtggttccatcttttgagcaaagtaaaaatgctgttgtctgggccgatttagtagatcgttgcaaggttacgatttggagcagtgtgcctgccattgtcgatatgttgttcagtgtagctcaaaaagaacaattacaatctttgcgtttaattgcccaaggcggcgactatatcaagccctcacttataacgaagttaagacaacaattacttaacgctcgtttattttcattaggtgggcctaccgagaccacaatttggagtatatggcatgaaataaatgagcaggatcaggaaattattccgtatggaaaagctttagaaaataaccagtattttattttggatgaaaatctgaagccttgccaaatgggcgaggtcggtacgatgtacatgactggcctaaatttatctaatggttatttacttgatggggaaattaattataaagatttcgttgatattcaagtgagtgaaaatgaaactcaaactgcttttcgcatgagtgatcaagggtattttagggaagatggaaatattatttttgctggacgtgaggaaggttatttaaagataaaaggcgtgagaatctctgcggccgaggttgaaaatgctttaaccaagcacccgtatattcataattgtgtggtggtaagttgtgtacatccaacgactgaaactcaagagttagtcgccgtttataccctagaaaataaatacaaaactactcgcttaaatagccccgaattaaagaactttttaaaagtgcatttgccgagttcacatattccttcgaaatatttgagcatcgaaaccatacctctgacccgaaatggaaaaattgatcgtaaagctgtgcaagaaatcgctcaggagaaaatttatgtatcttctacgttgtctgcaaattccactaaaacactgtcatcagtcgctgagctgggagattcggttttatcgattttccgtgaatgcatagctgacagccaagctgaaaaaatggatattttttatagaagtgaaatattagcgataggaattcgtccgaaacaactcatgagtattgctcagaaactttctcagaagcttaatacacaaattgatttttatacactcattagctgcaaaacaattcaggatgtggtgaataaagtagagcagcaaataaaatagaaaaattgaaatgtgcttaaaagcagagtcgagatgtttgcttttaagcacatggttggttttagggcaactagatttgagctaaggttgccttaattttttcacagatactttgcactgttgcagtcgggaagcggtgggcttgataagtaataatcatgcttaactgatgttgtccatcaatcacattttccataatttcaaaatgtaacccgaacatcgattcatcacgttccggcaaaatctgacgataaggaaggttttgtccctgaggtgttttgagcgcgccgtttaaagcgttatttgaatggatatgaataaacacatcaaataatagcccttcatcggcacgcatccctaacgcattttgaatatggttgattggaatatctgcataggccatcgaggtattaatcattgtgctgatattgtggagcaatgattggaatgaatctgaagggctaaactgtgtgcgatgcgccaccatggtcgtaaagtaacccaccgtatcaaagaactcaggatcagttcgtccagaggcagaagtaccaatcacaatatcttttaaattaccttgttgctgtaatgcatgggcgatagcagtatagagaaccgtgaaaatagaagagctgtgttgtctcgaaaatgcgagaagcttttcatgcatttctggtgcaaatttaagttcgagccattggactggaggtttttccttttcagcatttaattcatgttccgaaacaggaaggtttagtcctttggttgctcctcttaataggttagtccaataatttagatggtcttggttgataccttgtttttgctggagtaaagaaaaatcaagaatggattgggcaggtgccttccagtttggggcttgagcatttgagcgagcaagataagcatgcgcaaggtcagccataatcgtatttaaagaccattcatcaatcaccatgtgatgaactaaaaacgataaagtttggcgacctttagcatttcgaattaaacgaattcttaggggaagttcacgggttaaatcaaatttatatgaagcttcacttgcaagcgttgcatctttactttcggcactgttccaaaaccatttgaattgttgaagttcagatgtaggaataacctgttgataggtttgaccattggcgctattaaaaattgtgcgtaaacctgcatggcgctcaacaatatctgtaaacgcttgaaagaaaacatcttcattaatttcttcaaggaattctacggcaaatggtaagttataaattgggctaaaatcgaacgcggaataagcttgccacaggaaatcttgagctaaagtaagcggggcttgatcgacactttgtaaggtagttttttcagtttttgcagatttaactaaagcgtattgagctaaatcagcagcagatggagatttaaagaaatcattaaattgaatctcaattccatgtttattgagtaggttcccaataattcgcgttgctaatagtgaatggccgccaaaatcaaaaaagtcatcatgttgactcatttctggttcagcgagcgtatttcgaaactcttctaaaataatttctgacacataattttggttagattgttctgacgcttttgtagaatttgcatcgagttgatttgatatatcaatttctgtcagcaccaatggcatattatgtggtgaatattgttgatatcgattttgtatagtctgaataaaatctgacttttgatagctttcatcgagaatcgggtggagcgctaaaataagaaaatagtcttgttcagtttctacaagacttgtaaaaaaagggggatgaaattctgcattccatgcttgtgcttttaaggtatttacctgctcaaatacgtgttctgtattactcttttttacttctaggcaagctgaatggtcatcaaatggatatttgtataaatcaccttcgacactaaatgtatagcggacatttaagtcaggtgtagttttaatgatgtcttgaattgctttaatgagcagttgaatgtctaaatcttgattaagtttccatagattaaaacgtcggttaacttgttcaggctgttgtaattgcaacatccagatatgttcttcgtaatcagtaaccgaaaggagagagggcgatttggaaaattgttccaacataaatgaatcctggtttatcaaatggctattttcatcaatttttatttcgcaaattttttacattagattaaatttcatataattcataatgttatagatttgcttgtttgcaaaaattgacctttttctaatgagttgatgtccacatgaactgtactgatgtaacagtagggttacattttacctttaaacatactataattgattctcatttacatcaagattattatttgcaagtagatagtgccaattgagaatgacgaatttttaaaatagaaaataaataataagtgattgattaatatttatttaattcgaaattggttgggcaaaaataatttaaagatgaaaaaaacgctcctcggaatagggctgtgattttgcctattcaaaaggaactgattctgttgtctcgataaaattgaggaattttcatgagaatattcaatcatgaaaggttaataagcccatcaaatgttgaacaaattttccctcgctttggtttgatgggactaaatttgcaatttgcatcggctttattacgctcaagtggggcacgccactgatgcgatttggcttattctgtatttttatcattttatgtatttgttcgttattgctgggggctgaacaaatacagtggtctaccttattttctttttctcatgagagttggctcactcttacagccagccgtattcctcgtttaattactattgtgcttaccggtatcgggttggcggtatgtggcgtcatcttgcagcacattgtgcgtaacaagtttgttgaaccggaaacttcgggtggtttagatgctgccaaactgggaattttagtgtcgttaactttagttccggtaaccagcacgctgagcaagatgatatttgcgatcattttttgttttattgccagcttaatttatatcgcaattatccgccggatccgttttagaaatatggttttagtaccggtaattggtttgatgtacggcagtgtactgagcgctttagctgagttttatgcctatcgctttaatattttacaaagtatgcaagggtggcttttaggagatttttcaaaaattgtccaaggccactatgaagttatttacattatttttccgattgttgtcctgacttatctttttgcacaccgctttaccgtgattggtatgggtgaagagatggcttctagcctaggacttagttatgcagctatagccgctattggtttaatactggttgccattacggtttcgaccacagtaattacggttggtgctattccttttgtcgggctcgtggtgcccaatttggtcgcactgaaatacggagaaaacttagctaaaaccttgcccattgtggctttaggtggggcgtctctattactgatttgcgacattcttggtcgctcgattatttatccatttgaagtgccgatcggacttaccgcaggtggtgtggggggaattattttcctcatcctcattttgagggagttcagataatgcgtattacaaagctgtggatgatttatctgatcgtcatctgcctagcagtatgttttttatttttaaactcaggactagattttgattacgtcattcctaatcgacttctgcgtcttgccacgattgtgatagccggtatttgcgttgctttttcctcaattgtttttcagacattggtcggtaatcgtattttgactccctcaattatgggctatgaagcgatttatctcttatggcaagttttgttgttgttcttttggggaacgcatggactaagccagttaggaataaatggtaatttctttatctctatcgttttaatgctgctttattcgtgggtaatccataagtggttattgccatatggcagaaatgatgtctttctcctgttgcttttaggcttagtccttacgatggtcgttgggacggttactcaatttattcaactcaaaattaatcctggtgaattttctgttttccaaggccttagctatgcttcttttaatcgctctcaaccagaaactttattttatgccagtgtagctgtagttattgttctattcctcggtagaaaagcactccctgttttggatgttctggttttaggacgtgagcaagccatttcattaggcattcatcatcaccgctatgtcagtttctatttagccctgattgctattttggttgcggtatctaccagtctgattggcccgacagtatttatgggcgtattcattgccaacattacttatgcgctagcaagaagttataagcataaattaacgctgcctatgggctgtgccatcacgattgccatatttattgctgctcaaattttagttgagcacgtttttaattacaaaacgaccgtcagcattctggtcaatctggtatgtggcatttatttccttgcgctgacggttcgtacccgaggtgttgcatgattcatgtcaagaatatcaataagtcatatggaaataagccaatactgactgacgtaaatgttgaatttcctacaggtcaggtgacgtcactcattggtccaaatggagccggaaaatcgactttgctcatgatgatggcacgtttaattgagccggataaaggcgagatttttcttaatcatcaaaatattgcggatattaaaaccgctgtttacgccaagcatgtcgcgactttacgtcaagcacccggctttaatttgcgcttaaccgtagaagagctggtgtcatttggacgctttccctatagccgtggtgttttaaccgagcaagatcatcaggtggttgatgaagctattgagtttctttctttagaaccactgcgcaaatcttacatagatgaaattagtggtggtcaaaggcaaatggcctttttggcgatgacgatcgcccagcaaacagacgtacttttattagatgaacccttaaataaccttgatatgaaacatgccgttcaaattatgcgtgcactcaggcgcttatgtgatgaacaagggcgcactgtgattttagtcattcatgacatcaattttgccacgaattattcggaccatattgtcgcgctcaagaacggcaagcttcatttcagtgggttaacggaacaagtgattacagaggcgcaattaaatgatctgtacgagcttgattttgaaattacatacagtgagcgtggctgtatgtgtaattacttcaactcatctggagcttgaatacatatgaactggaagaaaaagtatgggggagtagccctcatcatagcggcagctgtcactctacaagcatgtgatcaaaaagttgcagataccactcaagcttctcagaagctagcagaaccgattacggtgaaacatgcgcttggaactacggtgataaatcatttaccgcaacgcgttgccgtacttgatatgaatgaagctgactttctagatcaactcaatgtcccgattatgggaatgccaaaagattatgttccacactttttggaaaaatataaaaaagatgcacaaattcaggatttgggtgcaattgtacagcccaatatggagcggatatatgcattaaaaccagacctaattttgatgacgccattacacgttaatcattatcaggaactgtcaaaaattgccccgaccattcactacgatattaacttcaacaatagcgagagtaatcatattggtctggttaaagaccatatgatgaccttaggaaaaatatttaataaagaagatttagcccgccagaaagtttctgaacttgatgaacaagtgaagcaagtacaagccgtaacggccaatcgcccggaaagagcattagttgttcttcataacaatggggcatttagtaattttggtattcagtcacgctatggctttatttttaatgcctttggggtaaagcctgcaagtggtgtggtggatacaagtctacatgggcaacctatttcgagtgaattcatcaaaaaagcggatcccgatattctttatatcgtggaccgaactgctgtgatggaacatcgctcaaacattaatgctgccagtgttgaaaatccattattacgtcaaaccaaagcatggaaaaacggtcgtgtcatttttgtcgatgccgatgcgtggtacaccacggctgcaagcccaacctcactcaaaatagtgatggaagatgtgaaaaaaggctatcaataaatttttgggcacatcacttagttaaattttagagcataaattttcactattttgctatgaattttaagcagatagttaataaaaaatgaatcaaaacattaaaggtctttcaatgaacaacgttagctataaccgtaattttaaaactgggaatgatcaaagaattaatcaccgttcttttgtattaaatggtgttgcatctgcacaaatagcccttcgattaggctatgcattaggcaccgtatttgttctatgtgcatcaaatacctatgctgctgttattgataattcagcaaaaactctagaacaacaaactgctcaaacaaatgtagcagctttacccgcaattaccgtaaaagctgaacaagatgatacttatgcgggagggcaggtttcgtcgaaaagctcagttggctttttaggtaataaaaccgttatggaaaccccgtttaataccattgcgtatacggatacatatatcgccgataaacaggcaaaagatataacaagtgtgattgcgaaaacagatccatccgtgttcaccaatgcggcaagtggtggctggagtgaaaactattatattcgtggctttgagtcgagcccgagtgatatgtctatgaatggattgtttggtataaccccttattatcgaacttcacctgaaatgtttgaaaaaataaatgtacttaaaggtccttctgcattactcaatggaatgccaccaacaggttccattggtgggacagttgatctcactaccaaacgtgcaacggatgaaccattaacacgtttgactacgacatatatgtctgactctcagtttggtgggcatttagatgttggacgacgatttggttcggacaaggaattcggtgtgcgagcaaatgcggtatatcgggatggctctggaccagtagaaaaacaggatttgaaaactgagttattttcattaggaatggattggcatggtgatcgtgcacgtgtttcgacagatctttacacatccaaagatcgagtggatggcgtaacacgaggcatcaacctcggaaaagatatcgcgattccgaaaccacctaaacctgagactttactcaatccagattggtcttttgtggacattcaagataagggcgccatgatacgcggtgaatatgatctgaccaataacgtgatggggtacgcaacctatggacaaagtaaaactgaatataaatataatggtgcgatgtcagcaactgttttagataacactggaaccttccaaacaagtattggtcaactggcatttaatgttgataaaaagtcggcagatgtagggctgaaaggaaaatttaatacaggagcagtaggacatcaatgggtagtcaatgcgacatattacaaacataatcaagatgattatggggtaagaaatgtggcaggagctgaatggacgactaatctttatgatccaatttgggggaaagctgtcccttttaatgcacccctaatatctaattctgaattgcaattaaatagttacggtttggcggataccctatcttttattgaagatcgcttacagttaactttaggtgtacgttatcaagaggtagaaagtagtaatttatttgtgccgacatcgactttgactaaatataaaaagaatgcaacgacaccaggcgccgcaattctatttaaagcgacagataaagtttcgatttatgcaaactacatcgagggcttaaccaaaggtgatgcagccccccttactgcggcaaactatccaacaatatttgcaccttacaaaacaaagcaaacagaatttggggtgaagtttgatcaaggtacatttgcgcataccttgtcattgtttgaaatcaaaaaaccaagtgcttacactgatttagtaactaatatatatacgtctgggggagagcaacgtaatcgagggattgaatggagtttctttggatcaccaattgaaaatgtacgtttgatgggcggtgcatcttatattgaacctgaagtgactaaaacagccatccaaagcaatgaaggaaatatggccgtaggtgtccctaaaacacaagggaaattaggtgttgaatgggataatgaagttgcacaaggcgttttaactttatctagcaatgcaaccgcagtttcgaaacagtatatcgatcaagaaaatacattgcatattcctggacgtacgctgatagatgtcggtgcacgatataaaacttcaatctcaaatcatcctattacttttaaagcagacatcaataacttgatgaataaagcctattggggaatgcctaaactatcgaatttggctttaggcgcaccaagaacgtatatgctatctgtatcatatgacttttaatttgttgtaatcttcaaccgaataaaaaaacccgcaatcgcgggtttttttatgatattcatattttattctggtaagccatagtgctggaaagaagactgtttaggaattcgataagcattacgtcctagtaattgattaataatgactgaatttcgagttgctccgattcctaagtcaggagaaccaacgccttgctgaaaaatctcggcattttgaatgaaaattcgaccttgtccctgatcacaacgtaaagccgtaaagtcttcttgaacaatacaatcatttttatcatcaacagctaaaatagaacccttcatattttggaaccattcaggccaatcatgaacatagcctgtagctgcgacaagggcatcagtttctaattcgcaacgttgatcgagttgggtatgcaaacaagttaaacgcagagaacccgattcaagttctttaaccgattcaacctcacagcttgtgtataggcttaaaccggatttttcaccagccactgaacgctcataaagcacatcatatatatcgccaatggttgagaagctaatccctttatagatcaggccctgactagcagcaatatcgcggcgtttatctctaggcaggctttggaaatattgcatatatgcaggggtaaagcactcttgtccaagtttagaatattccattgggtgaaagccggcagaacgtgtgatccaacgaatagatgcacctgcttttacttgttctggtgtaagtgaattaaataaagcaagtacacattctgctgcactctggcccgagccaataaccgtgacctgtttacattgcttgagttgttcctgaatttttgcaaactccgctgaatgttttaccaaagggtgtttgcatgtttccagccatttaggaattcgaggtttagttccaataccaatcgccagattttggcttatatatttttgtttttcgcccgaggctgattcactttctataataaatttatccagcttggcgtcatattccacatggcttacgttttctccaaatcgacaatcgggtaattgttttgaagcccaacggcaataatggtcatattcacggcgtggaattaaaaaactgtcgtaataataaaactgatgtaagcgatcatgttgatgtaaataattaatatagcctaagggatggcaaggattggccatagtaaccaagtcggcaaagaaaggaacttgtaatgtcgtaccttgcaatagcagtccttcatgccatcgaaattctggtttgcgttctaaaaatacgcttttgatttcgggatgatgagacaaaagagcagctaaacctaagttgaatggcccaataccaattccggtaatatctatttttttcatgtttatactttatctgtttccaaaatgatgaaagttcaaaatacgaattaatgtggtgttactagtttctctacatcagcaatattgcgacattgaataagttgaacaggtgagagctgaatcgcgtatgtttcattaatacgttttgaaacgacctttaaatgatgtggacgcagcccgagatgagtaaaatgagttgagttgtccacttccatatttggcgggtggcctatcacttctaagtaaatgtcgagtagttgattttgctgtttagcattattttcaattggtatagatgaatgatcggactcattatttttaaaatatagtcgtttattttgaagctcactgaaaaaattgctgagatcaaaactgaatatttctgaaccaataatttgcttgattgctaattgcagtgcatccaagaaatcgtcaatcatgttgggtggaaatgcttcttgggcataatcaatatcgaaaatcaaagcgccgtcatttcttgtgctaaagcgaatatcaattgcaacttgaggtgtttgggtcagtccatctagttgctgaataggatgagattcagataataccggccatgacaaaccatttgtaattacaatcggtaatactggagcagtgccaactttttcaaataatagtcgagcgagatcaacgcctgaaaatgaaagatgctgtaaaccctctaaaacttcagtttgcaaacggtttgcttgttcagcaaattgatctgaagttttccactcaacagcaataaacgtagagctattagaaaatggtccggcatagagaggaagtgtaggaacagcaacgcatagagatttgtccgtgctccaatgagatagcacttccaaaataatcgccatgatgattgagtttttaaacagtgaatgttttgcgccaattttagacaactgtttaaattgatctttttctataaccaaacttttacgttggtaacgtgaagtcggtaaatgctgtaagggcgttttccacggaaacgcaggaatagccgataatttagaaaattttctttcccagtaagccatatctgtgtgatgaacagataagctattttcagcttcattttcttctatttgtgtttggatatcatgttgttgcccatcaaatagctctaacataagtgaagctatagatcggccatctaaaatcaatgcatcaaagcggacaaaaattgttaatagattattttttaataaaaatacggtgatattccaaggcgactgatttaaatcaaatagctcatgcgtataactatttttataggactggatgtggtgagaagcacgttcaggttcccatgtagttaggtctatttcttttaaattgacactcacttgatcgcttatatattgtattaacctatttttatcaatataggttcgtaagctgtcatgctgccgtaccatttctgccaatcgttgtcttaataaaacaatatccattttgccgtgatactgcctaaactcttgcatggcaacaccacctaaaggaagggcttgagttcgacctaataggtaggcttgttgtaatgcatttaatggtttttgagacgtacgatctgacgaggtattttgtgctgggcttataatttgtgtattaagttgctcaggatgtgcggcaagatttttaagtaaatgaatgaaagattcaaataaattcgtgatccattctttgggtagagcatctaaacggatgtcccaattaactaaaataccgtcatctacatgagcaacttgtgcatcaagtgcaacttgtggcccttgtgaaatgacccaattcattgaaccaaaaacacgacggacatgctcagaaagcaaattattattttctaagtcgagtgccgctgtaaataccacgggagcaatctgtgcactaccatgataacgagacaggtcacgtagaacattaacacccgaataatgtgaatgctctaataactcaagcatttgatttgctatttgtttgcagaatgcggctaaggtagttgtccctttcatgtcgacatcaaggatgactagattagcaaaatcaccaatagtgccttcgacattttttaaaactggctcgcgccaaaaagtaggaatatttaatcggaagctgtgatctttggttgcatgaccaagcgtataggcaaatagacctaatatcaggttggttacagtaatatgttgttttctagcaagttgttgtaatgctgttcgttcttttggcgatagccaagtacttaaacgatcactttttgctgttttgaattcttgatgaatgaaaggtagagacggagcagggctaatatgagaaagacgttgtttccaccataagcggtctcgttggcttaatttttttaggtcaggatctgtccgtattttttgataccagtcaaaaaaattaggcggacgggagaatgatatttctgggtcttcataaaacaaagaaagatcttccatcaagttcaaaaaactggacggatctatagcaatcatgtccgtatctatatgaaaacgaaaaatattatttttaagaacacttatagaaaatcttgcagtctggccctgacttagatcaagtttttggtgggtccattgctcccgtttttgcatgagcatttgctcaatttgataatcgctaagctttgaaaaatcatcgacttctaatatctgttgagtcttctcagacatgatgtttgcgatgccatcggcactcaaacttaatctcaaaatagggtgttctttataaagtcgttgaagtgctaaatgtaatttttgtagatcaataaattgaccgtcaaattctgcatagaggtgggcagcaaccccacctaaagttgcgttgccagagcgaccaaaccagcaggccgcttgcatcgaagttaattcacacattgaacgataactcggttgacaaattaatcttgtttcagcatcatacaaacaaatgaaaatgattaccagttgcatttgttaatcatttccaattttgctgtgaatatatagcttgtccgtcttaagagttttctttagtcggtattcaaattaaatatttatgccgatatgtaagaaaatttaccaagaatcaatagtttgataaccattaaattaaattgaatatttagaatgtcatgaaaaaacagttgattgagtttgttcgctggtctcccgagagagcgcaacactatcgaaataaaggctattggattgaccaacctttgacgcgcattttaacggtaggggttcaatcgcatccgcattcgccggcaattatttgtggtgaacgtcagttgagttatatcgagctggatcggctatcaacaaatttagcttctcgactagctgaaaaaggcttgggcaagggtgatacagctttagtacaacttcccaatgttgcggagttttatattgtcttttttgccttgcttaaagcaggcgtggttgtactcaatgcgctatatagccatcgccaatatgaactaaatgcctttattaaacagattcaacctaagcttttaattggttcgcgtcagcatgaagtatttagcaataatcaatttattgattcacttcatgaagtaaatttaagtcctgaaattattttgatgctcaatcatcaagctaccgatttcggattattagactggattgaaacaccagcagagaccttagtcgatttttcatctacacctgctgatgaagttgctttctttcagctatcaggtggaagtacgggaacaccaaaacttattccacgcacgcataatgactatgactatagcgtgcgagccagtgccgagatttgcgatttaaactcaaatacccggttattgtgcgctctgccagctccgcataactttatgttgagttcacctggtgcattaggtgttttacatgcaggtggatgtgttgttatggcaccaaatcctgaaccgctcaattgcttctctattattcaaagacatcaagtcaatatggcatctttagtgccgagtgctgtcattatgtggctagaaaaagccgcgcaatataaagatcaaattcagtctttaaagttgcttcaagtaggtggagcaagtttccctgaatctttagcccgtcaagttcctgaagtcatcaattgtaaattacaacaagtatttggaatggccgaaggcttggtcaattacaccagactcgatgactccgatgagcaaatatttacgacacaagggcgtcctatcagttctgatgatgaaatcaaaattgtggatgaacagtataaagaggttccagaaggtgaaatagggatgcttgcgactcggggaccttataccttttgcggttattaccaaagccctgaacataattcacaggtctttgatgaggacaactattactattcgggcgatctcgtgcagcgtacccctgatggtaatttacgtgtagtaggaagaattaaagaccagattaaccgtggtggcgaaaagattgcttcggaagaaatagaaaaacttattcttttgcatccagaagttatgcacgcagctttggtcgcaattgttgatgaacaatttggtgaaaagagttgtgcctttattgtttctcgtaatcctgaacttaaagctgttgtgctcagacgccatctcatggagttgggtattgcacaatacaaacttccagatcagatcaaattaatcgaaagtttgccactgaccgcagtcggtaaggtggacaaaaaacaacttcgcagcattttaaatacatctacaacatcttaataaatattgagcagcatatggctatttcaaaaatttctacttatctcatgcccgaaagagagagttatccaaataataaaacagactggcaattagatccttctcgagctgttttattaattcatgatatgcagcgctactttttaaatttttacgatgctgaaagtgaattaattaaaacggttgttaatcatttagttcaattaagaacttgggcacatcagaacaatgttcctgttgtctatacagcacagccctatgagcagccagcggcagatcgagcattactgaatgcgatgtggggaccgggtttgccagcctcaacaatcgatcagcaaaaaattattgatcaactttctcctgctgaacatgacattgtcttaacgaaatggcgttatagcgcgtttaaacgttcggatttgcttgaaagaatgcaaaactggaatcgtgatcagctcattattggcggtgtctatgctcatatcggttgtatggttacggcaattgaagcttttatgagtgacatacaaccctttctggttggggatgcagttgccgatttttcagaagaagaacaccgcttagctttgaaatatgtatcttcacgttgcggtcaagttgtggataccgaatctgtagtggggcaggtggcaacaggcattacacgaccttggttagagcaaaaggtccagcagcttattgaagaagatgaattagatccagaagaaaatctgattctttatggactggactcattacgaattatgcagttttcttcggaactcaaagcgcagggaatcaatatcagttttgaagaattaggacgcacacccaccttatcaaattggtggtcattggttgatgcacggcaaaggattgcagggtagagggttgccatcataaggcatacgacaaatcctggtcgctaaatttatacataaaatttatatctttgatagcgactccttagacgacttgtaatcgtcatattaacggagcaaaaaatgattttatcgcctgctgatcaagagagaattgagacattctggaattactgtttaaaacatcaatacttcaatattggatatcctgaatctgcagattttgattattccgctttattccgttttttcaaattctctattaataattgtggtgattggaaagactatagtaattacgcattgaattcttttgattttgaaaaagatgtgatggcgtattttgctgaaatttttcaaattccctttgaagaaagctggggatacgtaaccaatggtggcacagaaggtaatatgtttggctgctatctggcgcgtgagctatttcctgattccacattatattactcaaaagatacgcattattcggtgagaaaaatcgccaaattattgcagatgaaatcttgtgtgatcgaatcattggataatggtgaaatcgactatgatgatttaatccataaaataaaaaccaataaagaaagtcaccccattatttttgcaaatattggtacgaccatgaccggtgcaattgatgatattgaaatgattcaagagcgcttagcgcaaatcggaatcatgcgccgagattattatattcatgccgacgctgccttaagtggcatgattttaccttttgttgatcatcctcaagcgttttcctttgctcatggtatcgactcaatctgtgtgtctggtcataaaatgattggctcaccgattccgtgtggcattgttgtggccaaacgccaaaatgtagagcgtatatcggtagatgttgactatatctctacacgtgatcaaaccattagcggttctcgtaatggtcataccgtcttactgatgtgggcagcaatacgtagccaaaccaatttacaaagacgacagagaattcaacattgtctaaaaatggcccagtacgcggttgatcgctttcaggcagtgggcattcctgcttggcggaatccgaattcaatcactgtggtatttccgtgtccttctgagcacatctggaaaaagcattatctagcaacctctggaaatatggctcatttaattactacggcacatcaccgagatacacgtcagattgatagcttaattgacgacgttatttttgatttacaaggtgcctctaaacgtacagttggtttttagtcatatcaaccaagatgatttagacaaatccatattaattttacagtctagaaaatgatctaaaaatattttgatagggtggttaggaagtttttgatgcaattaaagtttttaaaaaaatactttttatatgattttcttattcatgcttttttaaagccgaaaaaggcaattcttgctggtcaattgaagcgagattttattttaagtaccgctttttctatgaatataaagagagataagcatgtctgatttaaagttatctcatctgatgacagactcttccttggcacctgcactcaagccagcatttcctaaattatttgcaggaacgcttgctgccgtattttctggtttagccattttaactgccttgtggggcatgattcagttgattggttatttatcttcttattgggtgatcttttcagcggttttttggatagtcggggcggcattggcagcactagcttcatggttagtgcatgatgcagaggctggattttcggcacgattacgtcgtcaaattgctcatcatttaattcggttacctaacacaaccctatcaaaacagggtgaccaaaacttaaaacgactggtttcagatgatatcgcaaccttacaccatatggtggcacatttaccgtcggaaattgcgatttttgctgtaatccctttagtttctattattttattaattgctttggttggcccgatggccctttgggtattattacctggggcaattgcttcactctattatttaattattgttccccatgtatcaaaacgggatggcgctgcacgtatgcaggtcatgttagatattattggttctgctgatgattatgcgcgcggcattcgtgataatcgaatatatgggcaacaatcaggtgctttaacagcctatattcaatcagcacaaaattttactcaaaatatggtgtcttgggtgagtaaagtcgcaacactcgctgctgttgccacagccttactacaagctgttgcaacctttgccatagcctattttgtagcttatcaatacgacagcatgaccttggctgcaacacttttctttagcttggccatcgtgacaccttcgctacgtttagggcatggtcttgattatgtcgctgctgggcgagctgcagctagtcgtttatctgcattcttaaaagagccagtactctcgtcgggcaatctacaaaagattgagcaagatgtaacacttgaaatagtgaatgcaagctttgcaatcgaaaatcaaaaagtattggatcgattaagttatgcatttccaaaaaattcaattactgcaattacaggaccgagtggagttggaaaaacaaccttactgcgggcacttgctgggttcgctgtattgcaagaaggtgtcgttcaattagcaaaaacagatattttgcaattacatgaaaaactaagacatgaaaaggttttgtttattccacaaggtggagatgtattaccgaccacagtaagagaaaacttgtccttatctgccgttaatgcaaatgatgcacaacttgagcaggcattactcaaggcccaactaaaagtagatttaaatgcagatgcaactttactttcaggcggtgaaaaacagcgcctaggaatagcgcgtgcgtttttatcctcagctcctattattttattagatgagccaacgagcgcactcgaccagaccaatgcgacaaaaataatattggaattaagcgacttagctaaaaaacagaataaaaccatcgtcatggtcactcatgatcttgccttagctgctcatgccgacagtagattagtgcttaaaggcccaactgactcagggaaatctttatgaatactcctgctaaattaaataaagatcagattttttcgatgcttcctcgtgcggccaaacaaaaattaattattgttggtatcggatggatcattgttgcagcaattgaagcaatcgcatataccgtcttggcatttgcaattgtcaatcaatggtcaccaagctgggttctcatcagtgcaattgcagcaatattagtgacagttatagtcactcgtgctggcttccttactggtgtgcgtttagcaggggacctatttgctgagttaggcaaatctttagctcgtgccaagctctcttggtttaccaatgaacagcgtgctcagattaagacaattgctggacagggaattcctgggtttatgagtattcctgctcatcaattgcaaacctttttacatgcgccttttatgcctttatttctcacaataggaataggcctgcttgccggagcaggcgtagcatttgtcgctttaggcttacttttactctctttatttgctcaattcctagcacaacgtgcactcatgcatattgataaaaagcgtaatactgccgatttagcggcttcacaagcaacgctggaattggttgatcatgttgagttattacgcacagccgcgggacctgaacgtgcggtccaaaggctagaacatcgttgggaagagcaagaagagacattagtacggattaatcgtgctgctgcatttgcaagttttattgcaaccttagcaagtgttttacccattgctgggatggcaacatatctggtgatcgatggggtcaatcatgctgctttggtgttggcattactcgtcttaattggacgtgcagcagcgccattaggtgaacttgctaccgcagggttacatatcaatgatttgtttgctgcactgcgcaactttaatcagatcacccatccacctgagttgcctgagccattacaccctcaaattcctactggccatcatatttcggtacaagacgttagctatgcgccagcacttgaaaatatatctctcgatatcgcattggggagcagagtatgggttaccggaccaagtggtagtggtaagagtactttacttgaattgcttacacggtttgatgatccacaaagaggaaaaattacccttggtggcatagctcttgatcaaatgaaatatgaagatttggtctcgaatatcgcttatgtcacacaagaacctattttgttcacaagtacactggctgaaaatatccgtttaggtaaacctgatgcaactgatgatgaaatagaaaaggctgcaagagatgccgcattaggagcaatgattgaccgtagttcagaaggaattaatcaatcggtgggtaaacaaggcaccgcattgtctggtggtgaacgtcagcgggtcgcaattgcccgagcattactcaaaaatgcgccgattttaatacttgatgaagcaacctctgccttggatgaagagactgagcaggaaattgttacaacgatacgtgctctttcttctacggttatttttgtgacgcatcgtgattcagccatttggcaaccgactcaaactatcaatttagcttcaacttctgtttaaaaaaatagcgcagaaacctgatttaagcattttttataaaagaaaaatgcttaatatttggagaattcttaagtgaataaacatcaatataatatgttctgtttaccgcctgcggggagtagcgcgagtatttatcatccatggaaaaagcagatttctgacaatattcgtattattcctattgaatattcgggtcatggtataaaaataaatgaaccattgattgatgatcctgatctattggctatgcaaattgccaatgaaatacaagcttactcagacacaccatttattttatttggacatagtgtaggaggtggcttgatttggaaagtactcaattatttgaatgaaaaacccataattgatcagttgagattaattgttataagtagccgacctgagcaccactatattcaacatatgcggtacaagcatgagctaaccgatgaaaaaattattgatgaattaaagcgatacaataattttcctgacgaaattttaaataatcaggaagcactcacattctttctcaaaatcattcgtaacgacttctatcttagtgatcaattacttagcgagaagattcataagaccgaggttccgattgttgcattttatggtaaacaggaccctgatattcctaacaaaagaatgatggatgcatggcaacaacacacagaaaattggttaggaagtattgagtttgaaggggaccatttctactttcttaatcccgagactcgagtgaagatgcttgaaaacattgccgccatcgttgaaacattgaccgtgaatattgaataaagtccatgctatgaatacgaaaaagcagttaagtagaggggctaattcatgtctggatgaaataaatattcaatatgaaaagctaacagctttcgggatagatatacataaggtccagctcagtgaaatcaaagaaatacctcagcttgatcatatctatcaggagctgaatatatttcttccaccgaatataaaaagctcacgcttcattcgtcaattagagttcttgacggggcgcttagcagcaaaatatgcattacaacgcttcaatttacaagactctattgtccatcagggtaaacagggagagcccctatggcccgaaggagtgatgggtgggattagtcatgttggatcaaaaaaatcatgtcatgccatcgcatatgttagaaataacacgcttaaagaaaaaatatttggaatcgatatagagtctcaaaaacatcatattttttttcaaaagaaagatgaattttatgatgtttttctcaataaaaacgagcaagcagaaattgaaaagctactaaaagatcaagcatatttatatttggtaatattctctgctaaggaaagtatcattaaggcattttatttaaaatataagcaaattattgattttaagaatataaaatttaaagcgctagatggcgcgtttctttatttttaccttagacaagaaagtttaatcgagataactctagaggttaaagtttatttttttcatacaaataacgagataattacaatttcttgcattgaaaactaaatttgttattgataataataatcatttgcattaatgtgtgtttcagtatttttatatccttatatttaaaaagaagtactacagaatttgcttgaaaaaaatcaatgtgagaggtgatatacagatgatgcagactcaaatatcagtagagcaaaatttagatcatatcggtcaaaagaaattttcatgtttttctacgaagaattattatctcgaggtcaacgaattcgttaaaacgttaaatacacctgcagcaaataccgcactattgaatgaagagattgcaaaatgctttgaagaaattaaaaagcaaggccatcaaaatccagttttaattggtgctataccttttgatattacaaagaaaagtagcttaaatttttatgctgatcataaaaaaataacacaatcatcttctacgattaattcattaaaaaatcgtaataacattgagataattaataaatcattgctcattcaacgacaaaaatttgaaggtacagtacagctagctttagatgcttttgagaaaaagaaggtagaaaaagttgttctctctcaggctgttgaatatgagtttaaccgtcatcaagagcctgaaaatttattggctgctttattaaaacaaaatccaaatgcttataattttgtgattccagtcgagcataataattatatcctaggtgcaagtcctgaactgcttttgtcaaaacaagggcgtattgtaaccagtaaccctttggctggctctcgtcctaaatctcaaatttctgaaaaaaatttcgtcagccaacaagaattaaatcattccgagaaagatcaacatgaacatcgaattgtggttgaaaatattattagaaatttagctactcattgtgtagagcttaaggtttctgaatttccagatattttagaaacttcaacgatgttgcatttatcatcagaattccaaggtgtgcttaaacaacaggctcccgatgccttaaaccttgcattagaattacatccaacaccagcagtttgtggctcaccaactcatgttgctaagcaatttattttagatcatgaaggttatgaccgacattattacacggggttagtcggctggatggatgcggagggtaatggtgagtgggtagtgacaattcgatgtggtctactcagtgaaaataaaatgcgcttatatgctggtgcggggattgttgaagggtcagatgctgaagctgaatggctagaaacagaagctaaaatgcaaaccatgctaaatattctaaatacaaaagttgctgtgtaattagtaaacctaggcaggttttatttttatagccaaaacaataactacatattccacggggctatgctaaaaaatttaataaaaaagcctgcataaagcaggctcttttaattaagaggattattctaagaatttaacagttacgcctgaacgtactttattacctaaatcgttagcatcccagttcgttaaacggatacaaccgtgtgatgcagttttagaaattaaagacgggtttggtgtaccgtgaataccaaatgattttttgcttaaaccaatccagatattacctacaggagcatttggacctggtggtaatgaaagcggttttaagttattgccttgtacaaagttagaaggagagtagctgtaccaagggttacgtgctacacctactaccttgtaagtaccggtcggagatggcgtatcagtactgccaattgttgcaggaaatgacgcaatcatttgattacggctgttaaacagatacaactgtttcgcacctttatgcgcaataatcaagtgaatatcttctggtaagtcattgcgtacatttggaacaatgattttttcaccaacttttttgaatgtcgcagtcgggttaattttctttaagaaggcttcatcaatatgaaacttctcgcccaacatttcacttacgcgtgtgtagtacaaacctttcatttttgcttgtaaagcatagtcagaaggaattgattgtgcgtaaggaccttttaaatcggcatcggtaatggtgtattcaataaacgctggtttgttttgtttagcaacaagcgcatcccaagtctctttagttaactcgccagtaggagataaaccattcatttgctggaaagatgcaattgcttttaatgtatttttaccgctcatgccatcgatagcacccggtgaagcatgtgcattattaagcataacgtgagcgcgtgcataaactggaagttggcctttgccaatattttcataccactcagcgttgtttaagctatctaatgtccatgtaaccgctggcgcagaagttgctgtagacgcagtagctgttgtggttttagccgtagctactggtgttgaagcggcaatacctgaatcagcattttggtcttcagctttttgtaaattttgtaatgttgttgacgctctatttaggtcattttgttcttgtgcagtaatctgagtctgagcttgagcttttacagttgaagcagcatctacagcaagcggatcaatcggatcttctacaggagcagatactttattagggttcagtggttgctcagttgttgacgcagccaaagcaacattagcaataatacaacttaaactcatagcgagtaatgagcgaacaaacatgtaattcaaccttaagaattttcatataagcaatagggaaaatcagatcctttaggccataaattcaccaatcattcattcttatgaatttaatattggcttatttgagactcgaagggatataaataaacccgatgtaacatgctgcaagtattgcagaaaacgtttcttcttgcagtagacttttgtgtaaatatgcattttttagtagattggcaagttttttgtgtgaaattgaaattataaaaacactcaccttttgttatgatgctgccacatgaaaaagatagagatcggcaatgacgacacttaaaaatgatcgtttcttacgtgctttattacgtgagcctgtagatacaactccaatatggatgatgcgccaagcaggacgttatttgcctgaatatcgggaaacacgctcaaaagctggtgactttctatctttatgcaaaaatacagaatttgcttgtgaagtgactttacagcctttgcgtcgctacgatttagacgcagcaattttattttcagatattttaactattccagacgcattaggacttggtctgtattttgaaactggagaaggtccgaagtttcataaaacggtacgtactgaacaagatgtggctaacttacctaagcttaatgctaaagccgatcttgattatgtgatgaacgcagtaagtacgattcgttctgctttaggtggtcaagttccactgatcggtttttctggtagtccgtggacgcttgcaacttatatggttgaaggtggttcaagtaaagagttccgttttaccaagcaaatgatgtatgcgcagccagaagttttgcatgccttactcgaccatttagcagattcagtcattgactatttaaatgcgcaaattgatgcaggtgctcaggccatccagatctttgatagctggggcggagcattagcacaccgcgaatacgtcgaattctctttaaactacatgaataaaatcattgctggtttgcagcgtgagaaagatggccgccgtattcctgttattgtgttcacgaaaggtggcggtcaatggttagagccaatgattgcctctggtgcagatgcattaggactggactggactactccgcttaataccgctcgaaatgttgtctctgggcgtgtagcgttacaagggaatcttgatcctgctgttttatatggctcggctgcttccattgaaaaagctgtaaaagcaatgttagatgatgcttatgcaaacggtgagaagaccggttacgttgctaacttagggcacggtattacccaatgggtagatccggcgcagccaaaaatctttgtagatacggtacatgaatatagtgctaaatatctaggatagttttttgtgcaatatctgtttttacctcttcaatttattggcaaggctgtttcggcagccttgtttggtattttgcttctcatcgcttttgccctaactgcgtcgatgggaagccatgaatatatgggtttttatcgctatgattatttactcatatatgcactgattattcagatatgtctcttatatttaaaacttgaatcatgggcagaagccaaagttattgctttatttcatatcatggcgatggtcatggaaatattcttaacacatcctgcgattgcatcctggcaatatcctcagcctgcggtatttaaaattttgactgtgcctttatttgcaggctttatgtattcggctgtaggtagtttttttgcacgctcaatacgcctgctgcaagtttcatttgaaaaacttccgagtttcggaagtatgcttttactggcatttttctcatatataaactttatgagtaaattttttgtacccgatattcgctatattttatttgccatcagtgtttttattttttggaaaacaaaactttatttccaattaaatgagcataaatttaaaatcccgatgttgcctgtattgtttacactcgcttttctgatctggattgctgaaaatattagtaccttttataaaatttggctttatccaagtcaggtagaggcttggcatatggtggggtggggtaaacttggatcatggtatttattattgcttttgagtttagtgttagtacttaaaatattaggtcatcgagataatcaaggtaattggaatttaagataaatttttcttttacactttttatcatattatttattttttaattgctaaatgattggcttatcgctatctttaatatcgtgtaataagaattacacataacaatacataagaaacaatcaataatgatttttggagatatacatctatgttaaaaaaattagctttagctgctttgttagcagctggttcaagtgttgctatggctgataacgatgtaggttgtggtgtgggtacgcaagtatgggctggccaaaaaggagtggtgcctaaaattcttgctgcaacaacaaacggtatttttactaaccaattattaggtattactttcggtactttaggttgccgtcaaggtggaacagttacagcacaagttgttactttcacaaatgaaaatgcagaagctttagcgcgtgacatggctgtaggccaaggtgaaagcctgaatgtacttgctgagttaatgcaaatcaaaccacaagataaagaccgtttcttcaaagtttcaaaagcaaattttggtgaaatctattcaacaaacaaccaaaacacacttcaagtattagcatcattacaaaacgtaatggctaaagacgaagttttaaaagcttacgtataagtttgaaattgaaaaccctgtcatttggcagggtttttcttatatttaatgattaaaattgatgagcttaatgaaatcggttgttttaatttttgcctctttggcagtgaatattgcgtattcagcagaaacaaatccatctattcaaaactactggtccattgcagaacaaaaaaattagaccaagacattacatggcaaaggctcatgtatgccaataaaaaccagaaaagtgaggtcacttatgctggctattttctatcagaaaatggaaaaaataatttaaaagaagaactgaaagcagacatctcggcattatttatacctacgcaagataaccagtcaattcgctgtaaatttccggcacgcagtcagtggcttatacagcaattaggcattcaagaaaatgaattgccgcaagtaaaatgttcagaatttgaaaactggattgggcagattaagccttacaaagcgaccctaatttacgctacagattttatgggtaatccaagctcaatgtttggccataccttattacgtttagatcctaaagatcaacagcagttaaacctcgtttcttatgccgtaaactatgcagcaactgtggcaggcaatgacaactggtcatatgcatggaaaggcttaacagggcaatatccgggtgaatactcacttatgccttactatcgtaaggtaaaagaatatggtgattttgagagccgtgatttgtgggaatatgagttaaatctatctccagaagaaacgcggtttttggtgagtcatatttgggaaatgcaacatgtaagcttcccttattactttgtgagtgataactgtgcatatcggttattgggcttagtcgatttagttaaacctgaatctcatctacaagaaaagtttaactacgcttctattccaatggaaaccattaaagcgatgcaacaacagggactcactaaagctcctgtgtatcgacctgctttagaaactcaattattggcccaagctcaccagcatggtgcatctttagctaaagttgctcatcagttagcaatgaagccaattaaagagtcttcggaaacacttaaatcatttagcccatcagatcaggccaaaattcttgagatggcttatgatgatttatatctacagtttattggtcgcaaagttgaagaaagctttgctcagccacagcttagacagcttttagcactacgaagtcagattgatttagacaaacagcgccaagaacctaaaagaccatcaaccgagccgactcaaggccataatgcacgtaatgtctcgctaaaactgggcgaggtgcaaggtgacaagtttatcgagataggtcatagacaggcttatcatgacttaatagatccgcagggcggataccgtgccggtactcaattattatttttaaatggtaatgcacagtggcgagatgatcatttaaaactagaacatcttgatctgttagaagtgaactcttataacccgattcaaccatttaaaactccgctgacttggggatttaacttaggctggcgtcaggaagcggttcatgacggcgtttataatgatgaaaagcagcatggcgtcgcgagttttaatgctcaggttggttacagtcttgcagattatgagcgtaaatatatttgctatgggcaggtacaaacttatgtccaagcgggttcaaatttagataaaggctggcgtgtgggagtagggccgacattaggatgtatgaatcagtggcttgaaaaatttaacactgtggtacaagttgagctgccatattgggaagaccaaaaccaatggaacttacggctaaatacacagtggcaatatgccattaatagtaataatgccattcgctttaattgggattatgaaaaacaaaatcatctggactggatgaaatcaagcttaggatatgtttggttcttttaaaccatatacctataaaaaatagagaaatagatgatgactatttctctttttttattttagggaaaaattatttctttattgcattcagcacagcataagctgccttaatgcgctcttcatttggaatacgtttattggttaacatgactaaaccaatattttctttaggaataaacaccacatatgttccgaaaccggtagttgagccagttttatggtacatcttaactgaaggttcctttgaaatagcagtcactttattaggtttcatcacaatctgttctgaattactgtctaataaagtttgtaacgttgccggataagaaaactcttcccaaccgagtgcctgatacatggtatttacttgatagcgaccctgatgtgtttcattaattgcccgttgaatatctgctggatatttttgtggatttaggttggcatgaataaaactcaacatgtcgggtagtgtcgatttgacgccatatgctagggcatcgagtgggccggggttaactcgaatcggctgattttcttggttatagccaaaagcatagttttgcatctgggtcttaggtacatttacatagctatgttttaagccaagggccggaaaaattgttttttctaagacttggtcgaaaggtttattcatagacaaagctacaacttttccaaataaaccaatgcttgggtttgaatattgtcgatattcaccgattgagtttttaggtttccagtctttaaaaaatgttaaaacttgctgatctgtttttacttcatctggaaattgcaaggcaaggttaccacttgtatacgtcgcgagttgaagtaagttaacttggtcaatcggtgtattttttagttctttccaatacttaccaggcgtatcgtcaaaagagatttttcctttattttttgcatatccacctgctgtcgcggtaaataatttactgacagaacctagctcaaaaatagtactgctatttacggcttttttatcttgaacagattgaagaccataatacatttcatactttttattattttgaataacacccacagccatacctggcacatcatatttttctaataacggtttaaagttttgatctaccagttttttaatttcttggtcttttggtgtattgcccgcataaattgaggtactaaaaataaaaagcggggataaaagtagacaagaaatttttttaaatcgcatgattagctcctctgtacacgataaaaatagataactcattgaaataatgtcataataattgttttctaacgacgaatactatgacacatctcaatgagttatatcttatcttaaacaaatatctaaaatggaacaagtcacatttaaagtgctttgcgctcatcatgcttgtgattattttaaagcaaacatgtaatctttcttctgcatctaaagccttgcccatcaagtgcttaccacaatcattttatcgacgtatgcagcgcttctttgcaggtcagtattttgattatcgtcaaatttctcagttgattttcaatatgttttcattcgaccaagtgcaactgactttagatagaaccaattggaaatggggaaaacgaaatattaatatcctgatgctcgcaatcgtttatcgtggaatagcgatacctatcctttggacattgcttaataaacgtggaaattcagatacgaaagagcgtattgctttgattcaacgctttatagccatttttggtaaagaccgtattgtgaatgtgttcgcagacagagagtttatcggtgagcagtggtttacatggttaattgaacaagacatcaacttctgcattcgtgttaaaaaaacttcattgtcaccaatcatttaggaaagaatcataaaattagtgatttatttcgccatcttaaagttggtcaaattgaatgtcgtaaacgacggattttggttggtcgggtgaaactatatataagtgcactacagttagaaaatggagagcttttactcgtcgtttctcctcagtttaatgccaatgctattcaggattatgcattacgctgggaaattgaaaccttattcagttgtctcaaaggacgcgggtttaatcttgaaaatacgcgcttgacagaccctagacgagtgaaaaaattgattgcggtgttagctataagcttctgttggtgttacttaacgggtgaatggcaacatgatcaaaaaaaagcgataaaaataaagaagcatggacgactctcaatgagtttatttcgctatggtttagactatgttcaaatggcgattcagcgtttaattggttttgggaaaaaagaagagtttaaggaaattttggcaattttaagaaggcagaaccctgataggataagggttctgtgaaatttgtcgtgtacagaggattagctcataaattatttaaaaagaaagatgcctacttttataacaaaaatcacctaatttaattgttatgttttatagaattggattgaagtttatcgcgttcagctataaaaaaagcccaacattgtcgggcttttatttaggcagtaaaaactatattagtagctttctggtactgcacttaagaattcacggcgcgcttctttatcggttttaaaatctccgacaaatgaaactgtacgggtggtagattcttgtttacctacaccacgcatcatcatacacatatgtgctgaatcgatgactacagcaacgccacgagcaccagtcacttctgcaacagcttcagcgatttgctgagtaaggttttcctgaatttgcaaacgacgagcaaacatctcggtaatacgtgcaaatttagataagccaagaactttgccttctggtaaataggcaacatgaacacggccatagaatgggagaagatggtgttcgcagagcgaataaaattcaatattcttcaccaataccatttcatggttatctgatgggaaaacagcattattggtgacttcttctaaagttttactatagccagaagttaaatatgaaaaagctttagccgcacgcacaggcgtatctttaaggccgggacgattaaggtcttcaccgacggcagtcagaatatttgcgtacgattgctgcattgacataagacgtataaatttactctattagacaagctcggcattgtatcagaaacatgacctgatgttcataaatcctcgcactatatttattttggtttttccgtacgcttgataaaagatgaataaatttcatgttttttatcgttaatagtcaagtgtttggacatgaaatgtgcgcttaatattgataagttctaaatgatcgcctaatggcatcatatttgcacagaagcattattataaagcataaggataaaacatgttagaacgtccaatcaccttctttttccgtggtggtcagcagcaagtagaaaatatagtacccacaatgacggttttacaatttctgcgagaatatactcaaactggtaagactaggcagactggtacaaaagagggatgtgctgagggcgattgtggtgcatgtacagtagtgattggtgaattggtcaatgacaacctgcaattacgtagtgtgaatgcgtgtattcagtttttaccaactttagatggtaaagccttatttacagtagaagaccttcatagcttattgcctgtacaagatggcacacttcatcctgtacaacaggcgatggtcgatatacatggttcacaatgcggtttttgtacacccggttttatcatgtcgttatggtcaatgtatgaaaatgaacaacagtctctaagcaaagataaaatcagtgattatctttctggaaacttatgtcgctgtacaggctatcgccctattttagatgcagcacaaaaagcttatgactatccacgtgtggtattagaacgtcaaaaagtaattgatgtattaaaagagatcagaacattacctgcattgtatttgaatgatcaaaagcagcaattttttgcacccaagactttgcaggattttgctactttacgtttacagttgccgcaagcacgtattgttgcaggtagcacagatgtaggtttgtgggtaacaaagcagggccgtgatttgggcgatatgctttatattggtcaagttgaagagctaaaaaagattgtagtcacagaccttgctttaacgattggggcaaatgtaagtttgagcgatgcactcattaaaatttcagatttttatcccgattttcaagaattacagcgccgttttgcttccatgccgattaaaaatgcaggcacactagggggaaatattgccaatggttcgcctattggtgattcaatgccggcattaattacgctaggtacacgattgattttgcgtgtaggtaagcagactcgtgaaattgctttggaagacttttatttagactatcaaaaaacagcattacaacttggtgagtttgttgaggcgattgttattccgcttcgtgaagggcagacacgttttaaatttgccagctataaaattgccaaacgatttgagcaagatatttctgcggtatgtgcagctatttcttgtgagttagataatgatgatgtcactcacaatgtaagaattgcttttggtggcatggcagctattcccaaacgtgcaaaatatgcagaagccatattagaaggccagcaaattacagcagaattgatcgttcaggcgcagcaggcattgtcgcaagactatcagcctttagatgatggacgtgctagctcagcgtatcgtttacacgtcgcgaaaaactgtttaaagcgcttttatttagaaaaaattctgtctcaaacactcactcgtgtgaatgacctgattgctatggtggagatctaatatgaatcaaaccattgacttaaatatttctaaaaaatcagctaaagcaggtgattcgattccacacgaaagtgcacatttacatgtgactgggcaggcaacttatattgatgatttacccgagcttgaaaataccatgcatttggcagttggattttcaaattgtgccaaaggcaaaatcagtaagtttgatttggatgcagtacgtcaagctgatggtgtccatgcagttttttctgcaaaagatattgaggttgaaaataattgggggccaattgttaaagatgatccaatttttgccgaggaacaggttgagttttatggacaagccttgtttgtggttgtggccgagagttatcagcaagcccgtcaggcagttcgcttagcaaaaattgagtatgtgcccgaaaccccaattttaacgattcaagatgcgattaaaaaagaatcgtgggtgttgccgcctgttgaatttagccatggtgaagttgagcaggcatttcaaaacgcagcacatcaactttcaggtgctattgagctgggtgggcaagagcatttttatcttgaagggcaaatttcctatgcgattccacaagaaaatcagagcttaaaagtctattgctcgacacaacatccaaccgaaatgcagttactgatttgtcatgcattaggcatgaatatgcatcaggtcagcgtggaaagtcgccgtatgggtggcggttttggtggtaaagagtcacagtcagcgcagtgggcatgcattgcatctttggcagcaaaaaaaacgggccgtccgtgtaaattacgcttagatcgtgatgatgacatgagtgctacaggcaaacgtcacggttttgcttatgagtggtctgtagcttttgatgacactggtattttgcaaggcttaaaggtgcaattggcttcaaactgtggtttttcggctgatctttctgggccagtgaatgaacgtgcgatttgccatattggcaatgcctattatctaaatgcagttgagctacgtaacttacgttgtaaaaccaatactgtttccaatacggcatatcgtggttttggtggaccgcaaggtatgtttgtcattgaaaatattattgatgacattgctcgttatttaggttgtgatccagttgaaattcgtcagcgcaatttctttgccgagcagcccggtggtggacgtgaccgtatgcactatggggcagaagtccgtgataatgttgcgccaaaattggtagccgaactattgcaaagtagtgattacgcgaagcgtagacagactattcatgcctttaatcagaacaatgacatcattaagcgtggtattgcgttaaccccattaatgtttggtatttcatttaacgccgtgcattacaatcaggcaggtgcactggtctatgtgtatatggatggtactgtcgcgattacacatggtggtacagaaatgggacaggggctatataccaaagtacggcaggttgctgcacatgagttgggtttacccatcgatagcgttcgtttaattgcaaccgatacttctcgtgtgccaaatacttcggcaactgcagcatcgagtggcgcagatctaaacggtaaagctgttcaaaatgcctgtattaaaattcgtgagcgtctggcaaaacttgcagccgaaataagtcaaagtgaagctgaccaagtccagtttgaagatagtatggtttcaacagcgaatggtcattcatggacatttcctgacttggttcaacgggcatatatggcacgtgtacaactatgggatagtggtttttataaaacgccagaaattcactatgatcaggtcaaccatttagggcgtccatttttctattatgcctatggtgcagcggttagcgaggtcgcaatagataccttaactggggaaatgaaagtattacgtgctgacattttgcatgacgttgggcagtcaattaaccctgcaattgatattgggcaaattgaaggtgggtttgtgcaagggatgggatggctcacgacagaagagttgtattggcagccgcagggtccacacgcaggccgattatttacccatgcaccttcaacttacaaaatcccgaccagtgtggacattcctcatatttttaatgtcaaactatttaataatcaaaatcaggcagacaccatctatcgctctaaagcggtaggtgaaccgccatttatgttggcattatcggttttctctgcaattcgtcaggcagtacaggcggctattccagaaaatgcaccgctcgtactcaatgctccggcaactcccgaggaaattttacgtgcaattgctattggacggggacaagctttggctgctcgcccacaggctaaaatgtagaagattatgcaacatttacaatggtggactgattttgtagcgtggcaagccgatgcgttgcctatggtattagtcacagtggtccgtgctgatggttcaacaccacgagaggttggtgcaacgatgttgttgcgatttaatttgcaacagcaatggcagcagtcagatacgatcggtggtgggcatttagagtttcaggcgattgatattgctaaagcaatgttaaaagaatcggaaacttgtgtgaggcgtattgaacgctttaacctcagtgctcggcttgggcagtgttgtggcggagtaatgtggttattgtttgaaaaaatattacccgctgaaattgcgtcggatttatctgggagtttgcaagcatggcgagctggaaagcatatatggcgtaatgcctcatatcaatatgcatccacttggcaaacgatggatatggaacaacaaccaagtttcgagtttcattctggcagcagtgaagaatggcaatttagccagcagattcaaccaaataccatgcaagtgctgatttgtggcgcggggcatgtggctgaagcaattgtccgttgtttattacctattggtgtgagggtgaaatggattgatccgcgtgatgatattttcccatccgatttactggaacaggcgtactgtataacaactgataccttagacgccgagatcgaacattttgaccgttcaggtgcagttttaattttaacgcacgatcatcaactagatctgcaactgtgttttacagccttaaaacctacggcaaaaccatttgcttatgttgggatgattggctcaaagagtaaaagggccatttttgaaaaacgtatgcaggtgcgaggttatacttcggaaacattacaacgtttggtttgcccgatcgggatagaagggatttcatcgaaacaacctgcaatgattgccattgcagtagttgctcaattattacaggtatttgatgtaaaaaaatgatcccaaaggatcattttttttgttcgaattttggatttttttctgcacgtttaagcagtacgagaacggcacctgtgccaccttggttttcaggagcacttacaaatgccaaaacatcacgatgttggcgtagccatccgttgacataggtttttaagaccgcttctgggcctttaccatgcacaattttaatgacattttgattttcatcttttgccatctggatgatttgtaaaactgcgtcacgtgcttgttcaatggtacagccgtgtaaatctacagcttcaaaccaacgcatcttgcctgcttttaagtcttcaaaaaccttatgttgaagagtcgcaatgcgatagcttaacgttgcttggcttgcgaccggatttaaagcagcttgtgtatctgatagctcggcatgttcggtatcacgaccaccttcggcagctgcacgtttcgccagagtttgtgcatcaacttttttggcacgtggggtttttacatcggcaatattactattgttgatgggtttaacgcctgcaacagcctgcttaaatagatgtgtgtcttccaattcttcagactcagcctgagattttttagactcaggctgatttgcgattttgcttgaatgaggattggagatttgctttttaaattgcttcaataacttttgttgctctttagaaagcgatgaatctttattactcatatatcttcattaaaccgtttgaggttgtccaaaaagggcagtaaaagcttgatctggacgtggttgtttcataaaactttcgccaaccaagaaactgtgaatatcatgctcttgcatcatacgtacatcatctggtgtcgcaataccactttcagtgatcaataaacgtgaggccggaagtaattttttcaaccgaatagtagtatttaaatctacatcaaaggtttttaaattacggttattcacgcctaataaacattgctcagaaagctttaaggcacgctccaactcttcttcgtcatgaacttcaaccaatacatcaagttgatgctcaaacgcagttttagacatttcttcgagttgctggtcagacaaacaagcaacaattaataaaatacagtcagcatgcaaagcacgtgcttcaactacattgtatgggtcgaccaaaaagtctttacgtaaagcaggtagggcacaatgattacgggcaatcgcaatattttcatctgcaccctgaaagaaatcaacatcggtcaataccgataaacatgctgctccagcttgttcatattgctctgcaatttcggcaggattaaagtctgcgcgaatgattccttttgatggagatgcttttttaatttcagcaatcacgcccggacgtttatgttgtaaagcatttgcaaagccacgcaccggagtcgctgcttttgcaagctcttctacatcttgcaaattacgttgttttaaacgcgcagcaagttcctcatgtttacggtcaacaattttacctaaaatggtattttgaatattaatcatgagaagtccttaatctgcctgagattgttttaatgttttagtaaattcagctaaaacactcattttctctaatgcttgcccgccgtaaataatatcttgagcgaatgcaacagcctgagcataagtcttggtaatgcccgctacataaatgcctgcgcctgcattaagcgcaatcatgtttgcagctttttcaccaatgtcagatttatttttgcttaaagcatctttaatgagctttagactcgccgttgcatctgcgacaaccaaaccatttaatgtttgtgactcaatcccgacatcttcaggattaagggtccattccgtaatttcaccgtctttaagctcagcaatagttgtcggagctgcaagactgatttcatcaagaccatcttttgaatggacaaccatgacatgttcggcaccaagttgtttcatcacttcggcaatcgggcggcacagttcatctgaaaacacaccaatgacaaagcgctttacaccagcagggttggtcagtgggccaagtaaattaaaaatactacgaataccaagttcacgacgtgggccagccgcatatttcatggctttgtggtggtttggtgcaaacaagaaacctacacccatttcacggatgcagcgttcggtttgttgcatatctaaatcaagatgaatacctgcttgctcaagtaggtctgatgaacctgatttacttgaaacgccacggttaccatgttttgcaatggtcgcacctgctgcagcaatcacaaagctagatgctgtagagacattaaataaattttgtccatcaccgccagtacccacaatatcaactaaatgtttgatatcactcacatcgatcttgatcgcaaattcacgcatgacacgtgcagcagctgtcatttcgtcaatgctttcacctttcatgcgtaggcccatcattaaagcaccaatttgtgcttcggttgcctcaccttgcatgatgctgcgcataatttcttccatttgaggctgagtcaaatgaatgttcttggtaatgtggttgagcgcctgttggatattcatagtcatgatttacagcattaatgattaaaatttttaggtgaagttgatcgagtgtgggaggttcggcctattgcgttccatgattcactagctagggggctatgttagcagaaaataaccaaagatttttgctgttcgataagagttttaaaaattttgctcagttagggtatgggtttgagtcataaacagaatttatttattgaaaaaggttttagtttattgtgagtttttatgataaataattaaccatttggtatatcttaaacatcaatatatctagaaaaaatgtgtataaatcaaccaaataaaagtggatatagtagggcgatctttattttgtctattaataaatatgtatttaaataaattgaaatatgtaggggctttaaaaaataagcgctcatttatttttgtatttgttgcactgtttcatccattagaaagctatgcgcaagaaaccgtagagcaaacacaaaaccaagctaaaccagataaagtagttcgtgttgcggtgacaggttctcggatttcaaaagcacaaaaagatggcccgaccagtgtgaccgtcattaccgcagctgatattgaaaaacaagggtttagtaatgcatttgatgcacttaataacttgacgcagaacacgggttttgtacaaggcgccgattatggaaatacttttacacctgcggctaatgccattagcttgcgaggcttgggaccgaatcatactttaactttaattaatggacatcgggttgcagactatcctgtaccttatgatggctctgtcaatttcgtaaatttagccaatattccaactgctattattgaccgtattgaaatattaaacggtggcgcttctgcaatttatggttcagatgcaattgcaggcgtggtgaatattattctgaaaaagaaaacagacggcacacaatttaatatcaaggcaggcggaactaaagaaggtggcgaaaatttacgtttacaactgagtggtagtaaaactttagacaagcttagtctcgtctatgggattgaactcagcggccgtgaaccgatatgggcagccgatcgagattttatgaagagccgaactcgtttaggagaaaaaccagacacgattgtgggtcgtaaaaatgctgatactggtaaatatctttcaattggtggatgtcaggcctttaatggtttatttaacggatcagtcaataatattggacaagcaggggcggacaattgtgccagtggtttggcacggccaacttattggacggttcagacccaaaaccgcagccaaaatggttatctcggtttagattatgagttaaatgataaaactcaattatttgcagattttttgattggggcaaaccaaattgaaaataatacccgtagtccgatatggacttctttagctgcaacgagtggttatttcctaaatcaagattcgggaaattatgaaatttggaatcgccgttttgcacctgaagaattaggtggggtagaacgaataaataaaaaatggaaagaaatttcttctaacttaaattttggaattcgaggcgatattggagagacgagctggagttatgaagcagtctataatggttccatttatactagtcagctaaaccgccaaggcttattacgttcgaatgttgatgaatatttcttaggtcagcaacttggtacagatgcagatggtattcctatttattcacctcacttagatcgtttaagtcgaccactaacagcaagtgaatttgaaagtatttcgggcacaacaaaagaaaaagataaatcgtgggcacaaagtttaaccttaagtgcgaatggtgatgtatttaagttacctgcaggaacggccaaacttgcgactgtggccgaaattgggcgtcaaggtttttcgattaagccagatgaggcgatcgaaaatggtgagttttataatacgagttctagtggagaatatagtggtactcgtacacgccaagcacttggtgcagaattattcttacctttagcaaagccattaaatttaaccttgtccggacgttatgaccgttatgctttgtcagataacagtattgataagctaactttcggttcaggccttgagtttaggccacatccgactttattggtgcgcggtaactacgcaactagttttcgtgcaccagatatgaactatctgttcttaaataagcaaaaaggttatttcgcaagtacgactgactatttacgttgtagccaaacgggacaacctttagataaatgtagctttaaagattacgcacctggggcgaactacactttaaccggaaacaaagagctgaaacctgaagagggtaaatcttatggtgcagggtttgtttggtcgccaaccaataaatttgatatcagcgtcgattactgggatatcaaaattgataatcttgtgaccaacttaagtgcggacaaaattctacgtttggaagcagattgtcgtttaggcaaccaagatattaactctgcagcctgtattgatgcattagcacgtgtggagcgtaaccctgcaaatgcagttgtcgacccaaatgtgattaagaatataaatatcgttccgattaatgctgcatccgaccatacccgcgggattgatttcactagcagatggcgctggaaaacagacagctttggtaactttctctggacgatcaattatagccgtgtactagaacatgaatatcaacaatcaaaagatcacgagaaagatgactatttaaaagatttaagtagtctggattggcgtgaccgttttaataccagtctcagctggagctttggtgattgggcatcaacagtattagttaatcgttatggcaaaattccaaatggtaaccaaactgcctatttaagcccaacgtatttggtgaactggagcggtacttatcaaatctctccaaaagcttctgcttcaatcattattaataacttgtttgacaaagtgaaacgagatgacacaggcggttggccgtattatccgataggatcatattcaccattcggccgtcaaggttggttggagtttaactataaattctaagaatgatgtatggatgcagtgaagtggtacagcatttgctgcatctttttatttaaaactacagaggataaaaccccttatgctggtcaagccttcatttaaaaaaagattgttacttacaacattattatctttatcggcaacacagatttttgcatcgaataacagtgaacaaatcccgattggtaaattacccgagtgggtcgtacccgaatcttatgatttagattttaagattgatcccgcacaaaaaggctataccggtaaaactacgattcatttaaagctggctcaagccacagatcacatctggattcatggtaaatctttaacggttaaagatgtgaatattacatcggcagagggcgtcaaaaccaaggcaaaatatgagcaagcctctgaaatagatggggtgagtaaaattaaatttgccaaaaccttgcccgcaggacagtatcaactcgttctagattttaatgcagcgtatgaccagcagctcgatggtatttataaaatcgagtttgagggtaaaccttatgtgatgacgcaaatggaagcaattagtgcacgccagtcattcccatcatttgatgaaccacgttttaaaacgccgtttaatattcgtttgacgattccaagcaaatattcaggttttgccaatacccaacaaacatctgagcaaatagagaagtcagggtggaaaacactcagttttgcacaaaccaaaccactaccaacatatttacttgcattggctgtcggaccgtggcaattacaaaaagggcctgatattggagcaacttcatggcgtaagcagccgatccagttacgtggtattgcacctgatactaaagctgaaaaaatgcagcaagccttatctgaaacgccagccattttaaaaactttagaagattattttgcctttggttatccatttgacaagctcgacttacttgcagcaccagactttgctgctggggcaatggagaacccggggttaattacttttagagactacttgatgttattagataaggactcgccagttttttttgtacagaattcatttaatgtcaatgcacatgagttggcgcatcaatggttcggtgatgtcgtcacgatgccgtggtgggatgatttgtggctaaatgaatcttttgccacatggatgcaaagtaaaattactcaaaaattacatcccgaatttaatgctgacctagaacgtattacagacaccgcagatgcgatgaaaagtgacagcttagtgagtgtgcgccgtattcgtcaacctattttaagcaatgccgatattcaaacggcttttgatggcatcacgtatcaaaaaggtgcggctgttttaaatatgtttgaaagctatttaggcgaagaaaaattcaaacaaggagtgcgtaattatattaataagcaccaatatggtaatgcgacagctaatgatttaattagcgctttagcagagcagtctggacaaggtgagcgctttactagagcgatgaaaagttttcttgatcaaccaggtgtgcctttaattaacaccgcattacagcaagaaggcaataaagtctttttaaatgtgaagcaaagccgttatttacctgtgggctcaaaaggtgatgcaagaagcctctggggtgtaccgttatgtgtacgttatgaagttccaaatgcaggtagtaaagtgcaatgtgaattggtagaccaagcagaagccaagattgaactcaaaggtgccagccttggcagttggtatattccaaatgcagatgcggcaggatactatcaatttagtttgccacagaaagaatttactcgtctgactgctgctacagaaaagctttctaacactgaacagttggcttatgcctatgcaatttcagctgcatttaaccacggtgatattaatttattggctgtcgtagatgctgcgaagaaatttgccaattcgaatagccgacaaattagtacagcgctgttttcccagttaagtaccattcatcgtcatgtattgaaaacagaagctgaacgtgaacgttttagaaaagtcttagctaatttatatttacctaaattaaatcagttgggttatgtcagcaaaacagacgaatcagctgaagacagtttatggcgtagtgagttggttagatttcttgctctagatattcaagttcctgaagttcgtacccaactgttaaaacagtcagatgctctatttgctcaaaagcagcttaattttgcgcaagtaacacctgaattattgccaaccattttagctgtacgtgtacaagaaaaaggtcaaccagcttttgaccgattgtctggagagttacaacgcgtgactcaaccgacacaacgtcttgcaatacttacagccttgggttcagcaaatcaagaagcaacgcgccaacaagcacgtcagttgattttaaacccgcgtgttaaagttggtgaagttcgtaccgtggtcaactcaatcaatagttatggagatgaacaaggtggcttatggtcttggtttaaagtaaatcatgacgctgtgtttgatcgtttaggtaaatcttcagctgggcgtttccctgcaatgttcagtggggcagcttgtacccaacaacaagcagcacagttaaatgacttttttgcaccacgaactaaagagttggttggggtagaaagaggattgaaacaaaccaaagaacgtattcaactctgcgaatcgctggtagcaaaacaagatgggtcaattgtgcaacagttaaagttgtaattgattcagccataaaaaagccaactgatcgtagttggcttttttattaagggttcttatcaaattactttaaaaacaatctattgacggctgacttatgcgtagatgtctaaaaagtttttaaagatttgatggccatgttggctcaaaatggattcaggatggaactgcacgccttcaacaggaagtgtcttatgtttaacgcccataatttcttccattgagccatctgcttcattggtccagcatgttacttcaaggcagtcaggtagtgtttcttgatcaatgactaatgaatgataacgagttgccgagaatgggctaggaagattactgaaaatacctttattgctatggtacatatcagataaacgtccatgcatcaccgttttggctcttacaattttcccgccaaaagcttgcccaatactttgatggcctaaacacaccccaagcaaaggaatttttccggcaaaatgattaattgcaggaattgaaatacctgcctcgcttggagagcaagggccaggaccaatcacaagatattttggttgccatcgttcaatatcctctaatgtgacttgatcattgcgaactacttttacttcctgattcaactcgccaaagtattgaacgatgttgtaggtaaaagagtcgtaattgtcgatcattagaagcatgatgaacttaacctcatgataattaaaatatatttaataagtgactaaaaagttacccatattgatacctgtttacagaaaaggctttttaggtttgaaaaataagaagccgttttctaatgggctaatatagcaaaaaaagaagtaaccagtttaactatttcattcgctagaaatttgcagaaaaaagggctttaagaggtgaggctttttgaaattatagataactacaattaaggcagaataagcttctattgtaaataaaaaaactattctgccttggtcatacaagaagattaaatcttacgtgtgttataaatcaaccaatctaaaacatcgccagataaatgttcagccagtctttcttgaacagtttgatgataactatttaaccagtctttctcttcatccgttagcatgtcaacgacgatacaatctaaatgaatcgggcaaagtgtcagcgtttcaaattctaagaaatcgccgtaggttttctcaaaccctgagtgaagtctgtttgcaaccagattttcaatacgaataccgtattgtccctcatggtataagcccggctcgttggaaagaatcataccttcacgcaacttactataggcatgaataggtgcgtaataagaaagcacttgcggcccttcatgtacgttaagcgcaaagcctacgccgtgacctgtgccgtggcgataatctaaaccatgttgccataaagtatggcgacaaattgaatcgagtagaggagcggctaaaccttccggataaatcgtttttgccaaagcaatatgacattttaaaaccagagtatagtcacgtttttgttgctctgttggtgttcctacaggaacaacacgggtaatgtcggtagtgccgtctacgtattgtccaccagaatcaatcagtaatagcccatcgccttcaatgaatgagtaatgttcttcagttgcacggtagtgaggtagagcaccattggcattaaagccggcaatcgttgaaaagcttgggcctataaaaccctcttgttgagcacggaaagccgtaattttctcatcaatggtgagttctgaaatgcgttgactttgatgaaatgctttttctaaccagtggaagaaatggcaaagggcaacaccatctttcaccatggcatgacggatatgagctatttcactttcatgcttacgcgatttaaaaagtgtacttgggttgatgtcgtagacaacctgaatatcttttgcgatagcttgctcatgataaatcgatactttggcgggatctaacagcacagatgcattagaaatatttgctaaaaactgagctgaatcttgatagtcacgaatctcaatgccatcagctttaaaagcctgttgggtggttaaatcaactttgttactatcaatgaataaaacagcctgttgagcactgatatataaatgcgaaagaaatacagggttatattctacatcttgtccacgtgcatttaagacccatgcaatatcatctaaagatgaaatgaaatgtccttcaatcgctttagtttttaacgtttcgcgtattgcctgaattttttctttacgagatagggcatttaatccttcaggcattaaatgaatctgctctaaaggaagttcagggcggtttaaccagatcaaaccaattaaatcttgctgtgtttcaagcttaaagccaagttgctttgctgtattttccaacgctttaaattgttggattgaaagtgtttgcccatttactgaaataaccgaacccgccggtagatttttctcaatccatgcgagatgggtagaagattcatcactggtcagtttttgtaactgaaagccagttccagcgagttgctgttcggcttgtacccaatagcgcccatcggcccagagtcctgcaaagttttgggtcacaactaaagtgccaacagagccactaaaaccgcttaaccactgccttgctttccaatagtctggtaaatattcagacatatgggggtctgcactcatgacaaccaaagcatcaatactttgattggtcatgagttcacgaagtttcgctagtttttctggaacagttaagtcgttcatatcgtttccaaatcaggttgaactttgttggtacttttgtccattaatttattcattggtttctttaataaaaataacacgattgcgccaataaccaaggctaatacacagcgcataaataggctaggtaaatgattaataccatctgccgagacttgcccgccaattaaacctgccataaggttgccaagagctgtacctgtaaaccataaacccataatttgactacgtatgacatcaggtgcaagtttggtcatggttgataagccaattgggcttaagcaaagttcacctatggtaagaagaaataaagtaccgactaaccaaaatggtgaaactactccgccatgaatagcaaaatgactggctagagacataagtaaaaagccacctgctgcgaataacaacgcaataataaatttgctgatatagcttggatctttattcgctttacctagcttcgcccatagccaagctgcaactggagcaaagataataataaaaagagcattgattgattcaaaccatacagttgggatttcaaatccgaaaacaatacggtccgtataatcttgcgcaaataaagtaaaagtcgtgggtttttgttcgaaagctgaccaaaatagggcagaggctgctaataaaacgaagcaaataattattttaaatttttcatgttgctctaaattcaggaaaagtagtaaatatgcaaaataagcaataatcccaatgctaatacctacggttaaataggttgcgacagcgacgggattgatgtgaatgataccgaggaaggttagcgcaataacgactgcaactgcgaataaaaagctaaatacaattttaggcgcatttttattttctacaacaggtttgctacagctattggcttcttggcgtagctcattaaatgtttggagctgaggcattgccataaaacggaaaattaataaagcaattaacatcccaatgccaccaataccaaagcctaaatgccagccatggtctttcgccaaaagccctgtaataagtggggcaataaatgaccccatgttaattcccatatagaaaatggaaaaacctgcatcacgtcttgcatcattggctttatatagtgttcccacgatcacggaaatacatgttttaaataatccggtacctaaaacaatcagtactaaacctaagtaaaagaaagattgatcaaatacagatgtaagggcaattgataagtgacctaaggcaataataattgaaccgtaccagacagcacgtgcttggcctaaccagttatcagcaacccatcccccaaaaacggtcattaaatacatggagcctgcaaataatccaacaatcgctgcggcagttggtcgatcaagtgctagaccgccgtcattgaccatcgcaatcatataaagaacgagtaagggtcggattccataataagaaaatctttcccaaagctctgtaaaaaatagcgtttgtaatggtttaggatggccgaaaaaagctttatccgattgttcaaagtcatatttcattattcaaatccttgaatgcttttaagttttttgtaaacataacttttggtttgtttatttataacaaaaatttatgcatatagtttttagtttttttaataataaaagcaagtttggcctgtataaaaaaagtgaatgaaaaagaacatgaatagtaaaatttattttttgctgagtaatgtgagatctactatatgtggtcttattaactgcttagatagcgactaaatagtgcgtttatttagagaaattcataaaaatgaaaaataattattagattttaactaaagcagaaggcatttaactgatggtttaagtcataaatttaagttgctgaaataaaccaaaggaactcattggggaagatcgatgtcaaaggagtgattattttcaagtaatccgataagaatctcagcattatatataagaaagtattatgatcatggacgactgttagaaattgatgcagcggtttatatcagtgcaacaattttgcactaaattagggcaataatgagctatttaaatatgccataatttgaaaatgtgtgaatatggtgcatttacacaagcaaacagtataatgggttcaagacaaggggcctaaagcatgaatacttataagcaattcaatgttttaggtaagtcttataaagttggtatgagaattgcttaataaataccagcaactaacacgcactcaacaagtgcaacaaaatttcattggagcaaaatgagcatggcgaacaaggtccttcaactcatacaagaaagtggcgcaaaatgggtcgattttcgctttactgatactaagggtaaagaacagcacgtaacttacccagctgattctattgatgaagatacttttgaagacggtaaaatgttcgatggttcttcaatcgctggttggaaaggtattgaagcatctgacatgattttacgtccggatgcagaaactggtttcatcgacccgttctttgctgagccaacagtagttgtgacttgtgacgttattgaaccttcaactggtcaaggttatgaacgtgacccacgttcgattgctcgccgtgcagaagaatacttaaaatctacaggtatcggtgatactgcattctttggtccagagccagaattctttgtatttgacgaagtgaaatgggacatcgatatgtctggcgctcgtcatacattaatcgctgaagaagctgcttggtctactggtaaagattacgagtctggtaactcaggtcaccgtccacgtgttaaaggtggttacttcccagttcctccagttgactctgcacaagacatgcgtgcagaaatgtgtgcaaaaattgaagacatcatgggcccaggtcgtgtagaagtacaccaccacgaagttgcttcttgccaattagaaattggtgtgagcttcaatacccttgttcgtaaagctgacgaagttcaacagttcaaatatgctgtttggaacgttgcacatcaatatgcaaaaacagctacgtttatgcctaaaccaatggtaggtgataacggttctggtatgcacgttcacatgtctatctctaaagatggtaagaacttgtttgctggtgatgaatatgcaggcctttcagaaatggcgttgtacttcatcggtggtatcatcaagcacgctcgtgcattgaatgcaatcacaaacccatctacaaactcatacaagcgtttggttcctcacttcgaagcaccaattatgcttgcttactcagcgcgtaaccgttctgcatctatccgtattccttacgtttctaaccctaaaggtaaacgtatcgaagctcgtttcccagacccaatgatgaacccgtacttaggtttcgctgcgttgttaatggctggtatcgacggtatccaaaacaagatccatccgggcgaagctgctgataagaacttgtatgatcttcctccagaagaagaagcaaaaatcccaacagttgctcatagcctagatatggctcttgaagcacttcaagcagatcacgaattcttgttaaaaggcggcgtgttcactaaagaaatgcttgatgcatacatcgaacttaaaactgaagatgtacgtcgtcttaacacgactactcacccagttgaattcgatatgtactacagcctgtaatacatacttcataaaaaagcctgcttatgcaggcttttttattgcttggaatgttgattgaattctctacgttttttatcaaaaaattggggtaaactaggtgcgagttttcatgtgagcagattatgcgtaaacgacaaccagtacttaagcaggaaaagactttaaatcctgaattgaaaacatggttgtatgcgtctggttctctgacacaacaactcactgagctgggtggtgggaagttcagcgtaaagcctttcaaagaacatttccagcgtttaacttttgccgacagtcaatggatgaacatgccccatactcacacttcttgggtaagggaaacctatttatatggcagtgatgtagagccttgggtgaaagcaaaaagtatttttccaattcaaagtttacaaaaaaaagcccgtatatttcagcatattggttctaagccgataggtctttttttatttcaaagaacaacaccactttgtgatcgccgggttattcgtttacctgaaggctggacgcgacaaagttgctatacttggcatggatgtaaatttattgttcaagaaacattcttaccggcttttgaagcttttttatatcagcagcacgacaaggaattactatgacgactgcaacaggtacaacatggcgtcagcgtttagaagcttattattatctatgccgatttgataagccaattggtactgaactggtgttttggccaaccatgtgggcactttgggttgcatcaaaaggaataccgaatttaggtattttattcgtcatgattttaggcgtcatttttatgcgcgctgctggatgtgccattaatgactttgctgatcgtaaagtagatggtcatgtagagcgtacaaaaacacgtccgttagcaacaggggttattcgagccagagaagcagtatatgtattcttgggtcttgttttagcaagtgcatgtttgttgttctttttacccatagaaactttctactggtcatttggagcattatttttagctttcatttatccatttatgaaacgctataccaacttaccgcaagtttttttaggagcagcattttcatggtcaattccaatggcctttactgcggtaggtaaaactccggatctgacttgctggttgctctattttggtaatttggcttggacagtggcttatgacactcaatatgcaattacagaccgtgaatatgatttaaagattggtgtgaaatctacagctattctttttggtcgatatgacatccagattattgcgcttttacaagcaataagtcttgttttgattggtacagcgctatatttagaaaatatcttatttccttgggccattattgctttagttgtagtggcatttgattttatatatcaaacaattaaaaccaaagaccgcaaccctcaggtatgtttttgggcattccgtcacaatcgttgggttggattaatcatttttctaggaatatttttaaatttcatatagtaaaaatgaccgtgaggttgaaaagtgttctatgcagagcactttttttatgtcttaatatttgtgcatgaaaaatatgcggaataaataacacataaaaaggatattctatgaaacggtcaaaaattgctttagctataacattatcaatttcagcattatttcttacagcatgtaatgacgatgatgatgactacacagggatagacacaaataaagcttatgtctcagaaagtaattacgcaattgataaagttgataatgcttcatcaattaaagtaatgacttataacatggcaaatgttcaaggaaaaacagcaactgctacagcaatggtattgtttccaaaagcaacacaaccgaaagatggttatcgtgtagtagtatgggaacacggaactgttggggtgggtgatggttgtgctccaagcaaaaatgctattaatccgcggtttaaaatccttgctgagtctttattagcagcaggttatgtgattgtggcaccagattatgagggtttaggcaccccaggggtacatccgtacttaaacttatctagcgaagcaaaatcagcattagctgcagttaaagcagtaaaagagcattatggtgctcagttaaaaggtgattggatgtcgattggtcagtctcaaggtggccatgcatcattggggactgctgaatttgccaatacggatgcgagttataaaggtgcggtagccggagcacctgcttcaagtttgggaacaatcattcaaatttatattgatccgcaatttaatcttgattcaaacggaaaacctaaagaagtaaataaattggatgaaaacttgctgcaagttcgttatgcagtggctaataaattgattacagaagctgaaggtcaggcgatgattgaccaaattgctgatggttatgctgaattattagcatatgcagccttggcaagtgcgggtattaaagcacagcaaccagactatgatttgaaggcaatttttacgtcaggagcgggtgatattgcagaattggcttatggtcgtacaggggatgatggtgcttgtttaagttaccctacacctgataatgcaaatggtttacaagcgaagtttaaggcgggtattttagcttacttggcagatcctacccaccaaattgcacagtatggtattgatctaagtaaatttaaagcggatcaagtcgttcaaaactttttgacagcaactcaacctgcaacaaatgctacagccgagaaagttattaaaacaccagtatttattattcagggcgaaaaagatcaagcagtattaccagtagtaacacaaggcttatttgccaatatgaaagcgaatgctttgaagtttttccctcaagcaggctacgataaaggctatcaattaacaattgtaccaaatgcaactcatactcaagcaatcgtatgtcaaaatgccaatgctgtagattttattcaagctaaaatgtcagcgggtacaggtattgtgttaactgatgcgcagaaagatgccagccaaagccctcactgtacaggtaaattttaagacctatttacttgattaaaattagttttaaaaaagagtctctttatagaggctctttttgttatattgttacgcattctgaaatcgatattatttgagtttgaaggacttatgagccagcaatctgttgaaaaaaaatctgttccttggttattaatgggattaggtttacttattccttttctgattattggaatactttttttggctgcaaaaagtgatgctcagaataagaaacaatatgaacagcagcgtttagaaatggaaaaaagaatagctgagaaagaaactgccaattctgacaagaaataacagtagtttttaataaatatctttttgtagctggcgtacactcgggatgtttgtatagcgtcttacgatataacctgcctctatgagcatttgatcacgaagacgatcttcttcgactttctcaaggtgagtagggtcatctagctcaataatggctattacttccatgttttcatcaagcaaaacaaaatcagtgactttacggttgaactgactacggaccttataatcattactggttattaatgcgctaaaagccacttgtgctaaaacatgataacttgggaaactttgttttaagcgtataaacatttgagtttcaaaattagtaataacaggacgggcaaaaaatttttgttttggaaataaataaggacgtaaacaaacaagaagaaaaatacaggtgcttaagcaacctaaaataataaaaaataagtgactcgattcgaacatgtgaagacatcatacaaataaaaacccactcataaggagtgggtttttaagaatcttggctctcccacctgggctcgaaccagggacctgcggattaacagtccgtcgctctaccgactgagctatgggagaatctggaaagggattttaggcaggaaagggggcgaggtcaagggttaataatggaattagtgagaatatctaactgattggtttaaaaatattcgaaacattgattttattcaaaataatagaaaaatattaaatgattagaaaagaaaaagcccacaatgaatgtgggcttttagaatcttggctctcccacctgggctcgaaccagggacctgcggattaacagtccgtcgctctaccgactgagctatgggagattagtagatggctctccaacctgggctcgaaccagggacctgcggattaacagtccgtcgctctaccgactgagctattggagaatctgatgcgcattttatggatgaaatctaaaagcgtcaataagaatattaaagaaaatgaatcgtttgcttgattaatatgcttttgttgtactaaaaataaaaaaccacccaaaacagggtggttttttataaagaaataaaattatttctctacaccagctggttggcctgcaagttttgcatttgcatagtcccagttcacaaggttttctaagaaagttgcgatgtatttaggacgtaagttacggaaatcgatgtagtaagcgtgttcccatacgtcaattgttaatacagcaatttgaccatgtgcaagtggagtgtctgcattagaagttttagtaatagaaagtttaccgtttacttcatcagcaactaaccaagcccaacctgaaccgaattgagttgttgcagcagcagtaaattcttctgcaaatttttcgtagctaccaaaagcttcgtcaattttagcagcgattgcgccagtaggcttaccaccaccgtttggcttcatgctgttccagtagaaagtgtggttccaaacttgagcagcattgttgaaaataccagctttagatgcatcaccagcagttgccttaatgatttcttctaaagttttaccttcaaggtcagtacctttgattaagttgtttaagttaacaacataggtattgtggtgtttgtcgtgatggtattctaaagtttctttactgatatgtggcgctaaatcatcatagccatatggaagtgcaggtaaagtaatggttgtcatgttcctattccttgcatttgctgggttatacaattaagtggctctattgtaaatgattctggatgcaatagggcagccttttaaagaactatacacaataaagatctaattaatacgcataacacagattgaaaaaaagacttaattaaatcggattattcaattcaaaatattcactttcaatagcaaactgttttgaaattgcttgtgctaaacgttgaaccccataacgttcggttgcatggtgaccacaggcaaaataatgaacgcctaattcttttgcttcataaaaagttcgttcactgacttcgcctgaaatataagcatcgcaattttgtaaagcagctttagcaataaaatcttgagcaccgcctgtacagaagcccactttttgaatactttgtttttcagccggtaaatggatcactttaaaatcaaaactgttttgtagttttgctttaaattcctctacaggaagcgcttgctctaaataaccaatattaccaattggatgtttctcggttagatcaagtggttctaaattttgtaagtttagtttttctgcaatagcgatattattgcctaaacttggatgtgcatctaaaggcagatggtaagcgactaatgagatattattttgaataagtttttttatacggttacctcgcataccagtaattggatatggttcgcctttccaaaaataaccgtggtgtacgagtaagagatcggcattctgagcaatggctgcatcaattgcatcttcagaagcagttactgcacaaagaatacgttttacttcagttgaaccttcaatttgcaggccatttggtgcgtaatctttaaattctgctgcttttaaggtttggtcgcaccactgaataatttcatgcaaatttgccatgatatttcctgaattgagtagtaaaagttgctaaagctatagaaacatattttgttgtgtaactaaagctagacaaatcttttttgacttttttatgtatatcgacatatttaatttaaaatgcttaactgaaaactctttttgttcaatatattaatttaattaaaaacttctttgcgtagaggatatgaacgtgcgccgcacctttacatggttaccttgggtgttacttattattgtaattgccagttttattgcatggcaaaaataccatcagccgaaaccaactgttgcagttgatggggtgcaaatgccagctgagaaagttgagccactggttgatacttctcgaacgggcggggtggtgtcttatagtgctgcggtaaaagttgcagcaccagcagtagttaatatttttacgacccagaaagttaaacaaaatcatcctttattaagtgatccggtattccgtgaattttttggaaatcaggttcctgagcaacaacagcaaaatgaaaatagtttaggttcaggggttattgttcgcgccgatggttacattctcaccaataatcatgtgattgctcaagctgaccagattgtggtggcattacatgatggacgccgagcagaagctacaattgttggcaccgaccctgatacagatttggcggttattaaaatcgatttagataaattgccagtattgccttttaagctcagtggtaatgaagttggtgatgttgttttagcaattggtaacccatttggcgtagggcaaactgtaactcaagggattatttcagcaaccggtcgttctgatttaggtattaatacctatgaagactttatccaaactgatgctgcaattaacccaggtaactcaggtggcgcattaatcgatgtggctggtaacttgattggtgtaaatacggcgattttctcacaatcgggtggctctttaggtattggcttcgcgattccggcaaaggtttgtcagcaagtattaaactcgattttaaaagatggtcgtgttgttcgtggttggttgggtattagtttacttccacctacacaagacgatgtattggcacctaagcagcaagtaggtgtagtggttgctgatgtcttaaaaaatggtccagcagatgctgcaggaattaaagttggcgataaaattgttcaggtgaataatgagccgatcacttcagcttctcatttaattaattatgtcgctttgcaagcaccaaatagcgaaattaatgttctggttgaaagagaaggtaaacaacaaaactatgttgtaacggtaggtgagcgaaaagcacagaatacacaatctcagtatattccgcttccaagacgttaaaacctaaataaaaaaagcctcattttgaggctttttttattgttgttcattaggagtgactaagactttgatgctgatttttaaattcagctaaagcttcaattcgatattgaataagcatttcaccaatttcagcacccttaatgttctctggtaaatcttgaactttaatggagcgaacaatttgcattgcttcacgcatgtattgagcttgaggatatggacgatcttctagtcctaatctgccttttgcatcacactcgcaggcttgtacaaaagcttccactctttctgggcgacgtaaaacatctaagcgttgcaatagacgccataaagtaccaggtttcaaggacataatctgatgacattttaaatgttctttacaaacagataatgccaattgtttggtctgtgtcggaactcttaaacgttcacataattgggtaactggcttaattccacgttcttcatgcatgatatgacgaggaagttcttcagctggagtgagggccttaccaagatcatgcactaaaacagcgaaacgtacatcaagcgagtagttcgacttacaagcttgctgtaatgacattaaggtatgaatgccacaatccacttcaggatgatattcggggcgttgaggcacaccgaataaagcatcaatctcagggaaaagatgttttaaagccccacaatcacgcaaagtttggaaataaatatcggcatgattttccattaaagcgcgtgaagtttctttccagacgcgctctggtgttagtgcatcaagttcacctgaatctgccatggtttgcataagttgcaatgtctctggcgcaatttgaaaaccatatgggaaatatcgggcggcaaaacgcgcgactcgcaatacccgtaaagggtcttcagcaaaagcttctgaaacgtggcgcagaattttattttctaagtcgttttgaccaccatatggatcatatattttaccatcttgatccattgcaatcgcattaatggttaagtctcgacgaattaagtcatcttctaaactaacggttgtatcagtaaagaattgaaacccgtgatatccctgtccagactttcgttcggttcgtgcaagtgcgtattcttctttggtttcgggatgaagaaacacagggaaatctttgcctacaggttgaaaaccttgggcgagcatgtgttccggtgttgcaccgaccacaacatagtctttttcttgatagggatgcccaagtaaataatctcgaacagcaccgcctactaaatacacttgcatgaaaaaacctctattcttcaagcaatcatgctacagaatagaggttttctcaagtcattagaaaggcttttcgtaaaaagcggtttctaaattacttttcttgctgttgaatttcagcaactgttaaagcagtcatattgataagacggcgagtcgtcgctgtcggagtcaaaatatgaactggtttagcagcacctagcaaaattggaccaattgttacgttgttaccagaagttgcttttaacaagttgaacgaaatatttgctgcatctaggttcggcataatcaacaagttcgctgaacctttgaaacgagaaccagggaatgcaaaatgacgaatattttcgtctaatgctgcatcaccatgcatttcaccttcaacttcaagctctggagcttgctcagataaaatacgataaacttcacgcattttttgagcgcttgaatctgtctggtcactaccaaagcttgaatgagaaagtagcgctacacgtggtgtaataccaaagcgacgtacttcttcagccgctaaaatagtcatttcagcaagttgttcagcagtaggattagtgtttacataagtatcagcaataaacaagttgcgatcttcaagcattaatgcattaagcgtgaagaagttgttcatgccttctttaagaccaattacattgcgtacgaagtcaaggtgaatgttatagctactgtaagtaccacataacataccatctgctttgccaaacttaactagaagtgcagcaatgagtgttgaacgacggcgagcttcacgttgagcatattcaacagtgatgcctttgcgttgcatggtttgatagtagtctttccagaactcttcgtataacggattttgttcttgatctacaatctcgatatttacgccgtgttgtaaacgtaagcctaattttttgatgtttgcttcaatgactgctgtacgaccaactaagattggtttagctaaatcttcatcaactgcaatttgaacagcacgtaatacgcgctcatcttcaccttcagcgtatgcaatacgtttaggatctgtttttgcttgagcaaagattggtttcatcaagaatgctgagttataaacaaactcagaaagtttttgacgatatgcagagaaatcttcgataggacgagttgcaacacctgagtccattgcagctttagcaacagcaggcgcgatttctaaaatcaaacgttgatcaagtgggcgtggaattaagtagtcacgaccaaatgaagcagatttttcaccataagtcgctgcgtcagcttctacgtgagccatacgtgcaattgcatgtacacatgcaattttcatatcttcgttaattgttgtagcacctacgtcaagtgcaccacggaagatataagggaaacataaagcattgtttacttggttcgggtagtccgaacgaccagttgccatgattacatctggacgtacttcatgtgcatgttcaggcagaatttctggatccgggtttgctaatgcaaagataatcggattttcagccatttgtttcaccatatctttggtgagaataccagcagctgaaagacctaagaacatatccgcgccagccattacttcatgtaattgagtcgctttaatgtcttgtacataacgttttttcgattcatccaagccttcacgtgaagttgtaagaagaccacgagaatcggcaacaatgatattttctttatttacgcctaaagcacaaagtaaatctaaacaagaaagggcagcagcacctgcacctgaagcaacgattttgatttcttcaattttcttattaacgatttgtagagcatttaataatgctgaacctacaataatacttgttccgtgttggtcatcatggaacacaggaattttcatgcgttcacgaagtttcttctcgatatagaaacattcaggtgctttgatatcttcaaggttaataccgccgaaagttggttctaatgaagcaacaatatcaacgattttatctggatcgttttcagcaatttcaatatcaaatacatcgacaccagcgaactttttgaacagaacgcctttaccttccattaccggtttagaagctaatggaccaatattacctaaaccaagaaccgcagtaccgttactgacaacagcaaccaagttaccacgcgctgtatattttgcagcagctgaaggatcacgttcaatctctaaacatggagcagcaacccctggtgaataagctagagccaaatctcgttggttgacaagttgcttacttggcgtgacgctgattttccctggatttggatattcgtggtaatttaaagcggcctgttttaaagattgatcgtccatctgagtctctattgatacaaaaaagcaaactagtcaagttgctcacaaaggttggttatttatctgcttactatgtacaaaattatatcaagtaacataataggtagacgaatggccaatagcctcatggtgagctaaatgctaaagaatataacactacttctctatttctcacagtcaaaaacgctcatttttggaaaaaccagcgcatgtaaaatagactgttaaaacaattatcaaatatgcgtatttgtttgtagatattgaagaatctgatttggatgaagtggacggctaaagaaaaagccttgtaaaaaatcacattgctgcttttgtagataaataacttgttcttcggtttccacaccttcagcaactagttttaatcccatgcttttacccatcgcaatcatcgcattcacaattgcttcttgtttttgatcaccgattttcgaaacaaaggcccggtcaatttttaaaacatcgattgggtattctgttaaataagctagcgatgaatatccagtgccaaaatcatctagtgcaattgaaatattacgttctttaatggagtgcaataatttttttacattgtcagtattatctaataaagcagattccgtgatttctagttctaaatttgaaccatcaagatgatatgtgtctaaaacttcgtctaaatcactgagtaaaagacctcgatgaatttgttgagcaacaatatttacagaaactcggacatcggcgtagcctgcttttttccattcttgtagctgtttgccaactttatctaaaacgactttaccaatatcggaaataaggctactacgttcagcaaaaggaatgaacatattcggcataactaaccctttttcaggatgctgccagcgaatgagtgcttcaaaacctttaatcgatttgtcatttaaattaatttttggttggtaatacaccacaaattcatcattttgaatggctttacgcaactcttgttctaagtctgctgttttatatgggtttgtagttttattacagtaatagctgatagtattgccacctaaacgttttgcttccgacaacgcttgttcggcatgattgttgaggtgatcaatttgccggccatgctcagggaaacaagcaaccccaatagaagctgtaatgaaatattcttgttcatcaatataaaaaggcgcatttaaagcttgtaatatattttggcaatattgctcaatgttgggatgaataggtgatatttcataaataattgcaaaatcatcgccgtttaagtaagccactaaaattgcattgatattggtcagtcgtagtcgctgtgcaaattgtttaagtaactcatccccactatcattatttagaaactcattaaatgctctaaatctatcgatattaatacgtattaaagccagatttttaaaactataagatggattaacaagatattgatgtaattgattataatagtaaaagcggttagggaggtgagtcaaactatcatagttttttaaataagataaatgctgctcttgtcgcttttggtcggttaaatcacgtgcaaaaccaatataattaataatctggttgtactcatctttaactgcattaatatgaagccataaatagacacttttacccgatgtaaacttttcatcaaattggcccatatattcgccagtttttagaagttgttgagtaatggagtcgtgaaattgttgttgctgtagcttctgatttattgtgatattaaatagctgctgacttaataattcagattttgaaaagccagttaatttctcataataggggttaacttcaatatagttgagtttttcatctagaataaaaattccttcagctgcctgctcaagcacaatcgcagaaagtctcaaatgttcttgatcttttttttcctgatgaatatctctggtcattccgaccatacgtaaagctttattggttttaggatcacggctaatgacacgtcctacgtcatgaatccaacgccaagaaccattacgacgtaaaatgcggaaggtaatattgaagtgatcagattttccttccaagtgttcttttaaacgttcatcaaataactttcggtcattgggatgaatgcgctctaaaattgacttgaggtgtaaaggagtattttgagtttgtttttgttgatcaaaaaacgttatttctaatttttgtttctcaatatcccaatcccacggtcggatacctgctgtttcatgtgcaaatgctaaattatgatgatggctttcaagcctctcattcattttagtgaggtcatatgtcctttcccgaaccttttgttcgagcaaatgattattaaattgaagctgtgcttcaatatctttagatttatttacttcttgttggagctgtacacataactcttcagcccattgagtatgctgttctgctacttgaacaagttgtttatttttaaataatagttgagaaattttttgatagttacgctgagttgcataagcacaaagcaaagttgcgacgaaagctaaattataagcaaagtaaaaggggagttgggtgatttgagaatgagtaaactgtccaataatgagtgggactgtacttggaataaagagtaaataaaaatatcgaggttgttgagttaaaaatgtaagaccaataatgtgggctgaggtaataaataatgctatgaggatatgaacatcagaaacagatattaaagtgtcaggaagggaaaaatgcagaacaatgatattaattcccattaaaattccagacgtcaaacaaatgccttgtagcattaaatcggttttcttaatgaaatgaatatcacgataatgtgttaatagctttgggacaaataatagacaggtaagcgttaaaatagtaaagccaattgaccaaataaagtttgtaatgtaagaagtaaagtaacaaaagaaaataatagctgaaattaggcacagtaaaattaggctaacaagataccagcggatatattgaattgagaggcgaagctgctcaatttttgtttgatgctgtaaatattcttcctgaaggccagacataagatttttctatcctatttttttacatttatacagaaagaatctgatttatcagtggaaaaaaatttaaattaatattcatatcgtaaaagtaagttaactttaattgttgatttaatcaatgttcaataagtttatatggataaaaaccgataatttaaaatagataatgctacaacaggtgcagtttcagtacgtaatacacggtccccaatacaccagttcataaatccagcttgattggcttgcgtaatttcattttcacttaaaccaccctcgggaccaattaagagggctagttcaggttgtatccctgccaatacatctttttgttctttttcaggagccaaaacaaatttagatgtaggaaggtcggatgagtttaaccattcatgaagagaaataggtgctaaaacttctggaactaaattgagtccacattgctcacatgctgcaattgcaacagcttgccaatgatctaactttttttgatcgcggtcgtatttcaaacgcatttcgcaacgttcactggtcaagagctgaatcttactgacaccaagttcagttgctttctgaatggcataatccattcggtcacctttactcatgacctgaccaagaatggctttaaatggagcattacggtttacaggattaaaattctcaatagtgacaaacgcattttttttattaatttcggtcaatgtcacgagatactcaccaccttgcccattaaatagtgtagcttgttcttgtaattgtgcgcgtaaaacacgtacccaatgatggaagactgattcagttagttgaattgttgagccaactgtaagttcagtttcgataaaaaaacgattcattgggtacgccttacaaaattaatttaaaccaaggtcaacaacaagctgacgagttggttcgacttggttcattgagtaaaagtgtaagcttggtgcaccacctgcaatgaggcgttcgcatagcttaacaacaacttcatgaccaaaagctttaatactttcactgtcatcgccataggcttgtaattgcttacgaatccagcgaggaatttcagcaccagtaccatctgcaaagcgaattaaattacttgcattggtaataggcatgataccaggagcgactggaatgttaattccagctttttccaaacgctctataaaataaaagtatgagtctggattaaagaagaattgagtaattcccgcattggcaccagcttgtactttttcaataaaacgttggatatctgagtcaaggctttcggcttgaggatgcatttctggataagccgcaacttcaatatgaaaatgatcacctgagtgctcacgaataaaacgtactaaatcttgagcataaggaagttcgccaagaccaacctgtccagatggtaaatcaccacgtaaagcgacaatacggtcaatgccttgagctttgtataaatcgagtagttcagcaatacgcgtcttatcatcaccaatacaagaaaggtgaggggcaacaggagtgcctttaccattgaaatcttcaatagcagcaagtgtgcgttcacgagtagaaccaccagcaccataagtaattgagaaaaactctggatttaattgctgtaattcttggtgaacaatacgaagtttttcagcaccggcatcagtttttggcggaaaaaactcaaaagaaataggtgtacgtttagtcatgtcaaatccttgtaaacagcgaaacatttttagaaaaaagggcagtcggttcaccgtctgcccttaagttcttagtatttgtaagcgtcagatttgaatggcccctcaacagcaacgcctaaataatcagcttgctcttgagttaactgagtaagtacaccaccgaaacctgcaaccattgcagcagcaacctcttcgtcaagtttcttaggaagaacttctacgcgaatttttgcagctttttcacttgcaggtaggtcggcaaatttctcttggaataagtgaatttgacctaaaacttggttagcaaaagaaccgtccattacacgtgatgggtgaccagttgcattacctaagtttacaaggcggccttcagaaagaaggataagatagttgttttcgtcttctgaacgataaacttggtgaacttgtggcttaacttcaacccacttgtaaccacgtaaataagccgtgtcgatttctgtatcgaagtgaccgatgttacatacaactgcaccagcttttaagctgtctaacatcgctgcatcacacacatggtagttaccagttgttgttacaataaggtcagtgttgccaagaagatcgtggttaatatcttcttttttacctgtttgtacgccgtttttgtatggagatacaacttcataaccatccatacatgcttgcattgcacaaattgggtcaacttcagttacacgaacgatcatgccttcttgacgtaaagattgagcagaacctttacctacatcaccgtaaccgatcacaagcgcacgacggccagataaaagcatatctgttgcacgtttgattgcgtcatttaatgagtgacggcaaccatatttgttgtcgtttttagacttagtaacagagtcatttacgttgattgccggtacttttaaagtgccgtctttccacatttcgataagacgttgaacacctgttgtggtttcttcggtaataccgtgaatgcgctctaaaagtgcaggatatttttcatgaacaagagcagttaagtcaccgccatcatccaagatcatgttggcatcccaaggttggccatttacattaatttgttgttcaaggcaccatacgtattcttcttcagtttcacctttccaagcaaaaactggaataccgcgagcagcaattgcagcagcagcgtggtcttgagtcgagaagatattacaagatgtccagcgaacttcagcacctaattcaacaagcgtttcaataagaaccgctgtttgaatggtcatgtggatacaaccaagaatttttgcaccagcaagtggtttagacgctgcataacgtttacgtaagccgatcaaagctggcatttctgcttcagcaagtttgatttctttacgaccgtagtcagcaagtgagatgtcagcaactttgtaatctgtaaatgaagcattaaccgcgttcatcaggatctcctaggaaaaaatagtattgatcattctgttcgcggatgccgttgttggttaaaacgactgtttaaccgatcgtcgagcctggcaaaatgatctttagtgccgatcatttgtcgcagcatccctcgactagcgaaacattgtacttggaaaagcttttagtgccaatccagttttgtttattatctgcgtaattacgactttagatttaaattatggccttaaatattcccgaatctttggcaaacctcgaagcgaactgtggcctttttgcagtttggatggtacttcaacatcatggagtacaaattgatgttgctgagctgattaaagtttgccgctatgacgatgaaggaacttatacgattgctttagccgttgctttaaaaaagttgggctttgaggtgtcatttcactcagatcatgatcctaacattagcccaagcgaacgcatgagctataaagaagcaaagatattaaaaataccaactgggccagcgctgagctatcaagatattcaaacagagactcaaaatggaaaaatggtgattgtgtactacgacactttagaaggggtagggaatcagtcgctcatttattctatagatcaaaatgaaatctgcttttttgatagttttgagccgatgtcggcagcagtttttgagaatcaacgtaaagcagaaggtatttgccgtcaggctgtcgtaattggtgaccgtaatttaaatattcattcgactaaattgaattaaacttaaatgagccagtaaagtgctggctcatactgaagttattgttgttgatattcttgaatgacttctaacgcagcccggaaagcttcctgagtagcaggggcaccgcaatatggcaggctatgcaataaagtttcctgaatttcttcaactgtacaaccattgttgagtgcaccacgaacatgacccttgagttctgttggtgatttgagtgcagttaacattgccaaagtgattaatgagcgatatttacgtggcagcacaccttcacgttgccaagtcgatccccatgcatgttcattaatccagtcttgtaaaggctgggtaaagggcacggtattttcttgggcacgttttacaaaagcttctcccatcacttctgtgcgtacttttaatccattttcgtaatcttgcttagacattaatttctcctaaaaataaaagcgtcgagtgacgcttttatggctgtttattaattaatgcgaatcaaaaatgattgcaatagtgaattagtggaggcatcagtcacactatttgatgaggatttgataaaggcaggactttatttagcttttcatcaaaaacatcggtaagcatgctatcgaatcgaattgcgttgtactgcaataattgttgagcttcgctttcagaaataaagccttcttttatcgcttgagcaatattctcttcaaaagtaagacccgtaaacttgcctttggattcagctttcttaaacttatcccaaagcggttcaatggttcttaacatttggaacgtgtgctctagacggccagtgacatcattaggttcagttgaatagtacacatggcgtttgagttgctctctaaacggatgttcttccatcatgagttcagcaacttgttgttttaactcatcgtcaggttttgaaatcacacgacctaacgggaagcatatccatttgacaaatgctgctggaagcttggctgggaagttgtcaaatagtccccaaaatgcttcctgaatattcaagaatgctttttgcagtgctagtttggcatgaagttgttcagcttcagttttttgtccagcctcataatattttaaaattgcagtggcaataaacaagtgcgcgtgaatatctgccaagcggcctgatagcatttctttacgctttaggtctcctgcgagtaatcctagtgccatatcggaaacaagtgaaaaattggcgctaaaacgattgatggttttatagtagcttgcagtgaattgatctgctgactgaggcgcatcactcgaaccacctgtccaaccataagcaaatgatcttgcaccgcggttaaaggtataggctaaatgtttaaacaacaaatcatcgaatttttgtacggcattggctttgtcgtcagactgaagtaattgcaattcttcaaaaagataagggtgacagcgcattgagccttgaccaaaaatcatcaatgagcgggttaaaatatttgcaccttctactgtaatagcaattggaatcgcttgataggtgagagcaaggaaattgcgtggcccaagttgaattgcacgtcctccagcaatatccattccgtgattaaccactttacgcatcgtttcagttgcatagtattttgccatggcagtcattacagcaggggttccaccttggtttagaccacacgtcactaaataacggaatgcttcaagcatataggcatcgctggcaatttcactgcttgcttcttgtacaccttcaaatttgccgacagaaatattgaactgttgacgaattcttgcaaaagcaccgacagtgagatagctcatttcacctgcggccgtggctaatgcgggcagtgaaatacctcggccaacacctaagcattccatcagcatgcgccagcctttaccagcattttcttgtccgccaataatccagtcaattggaatgaagacatcttcaccctctactgtcccattcatgaatggagagcccggatagtgtcgtgcacctatttttacgcctgcatgattggctggaattaaagcacaggtaatcccgtactcagttttagtcttatctccaagtaaaccttcggggtcataaagtttaaatgctagaccgaccactgtggcaattggagcgagcgtaatccaacgtttagagaaattcatgcgcagcccaagaacttgagcaccttcatattcgccatagcagactacacccgaatctggaattgcacctgcatctgaacctgcttccggactggttaaaccaaagcatggaatttcttcacctttagcaagtcccggtagatattgctgcttttgcgcatctgtaccgtaatgcatgagtaattcaccgggtcctaatgagttaggaaccatacaactcaccgcagcagttaatgaacgcgaggcaattttgctcataatgcgactttgagcaaatgagctgaactctttaccaccaaaggattttggaataataagacccaagaagcctttatctttaatgaactgccaaacttcaggaggaaggtcttttaattgatggtgaatttcccattcatccagcatgctacatagcacttcaacttcattatcgataaaactttgttcttctggtgaaagtgtaggatagggatatttttcaaattgcgaccaatctggagcccccataaataactctttttcccaccagcttgttcctgcttctaaggcttcttgttcagtggtactgatgctcggcattgagttggccagagttttatatgcaggttgggtaattaagttaaaccgtaaaggtttaaacaaaataataatgctaagtgcaataaggggaatccctaaaagtaatgcccacggcgttaaaatgaaagcagtaagtatggctacagcaatcgtaataacactaccagtgactctatttaggttaaaaaagaaaattgcccatattgcaacaagctgaatgacaatacttaaaacaaagagtaggaaaatcatacttgctccttgctagataagccctcaagttagaaataataaaaaagcgaggagagatttaaggcttaactagcgaattttttaatgctgtttaaatttgattttttatgtcgcaattgatgtatatgctagagcagggatatatcgtgcttttaagtataaaatatttttgaatgaaagtgtaatggcttgttttatcgatttgtcaagaaatgttattgattttcttgtataaataaaaaagccctcataatctgaaggcctttttaatacttatgaagtgttaagcttcgattgcttgtaccgcaatttttttcgcaggatctaccttgcgacgaacttcaggaacaggttcaccatagtattggcgatcagcaaaatagcttgaacgaaccattggtgcagaccaaatatttctaaagccaagtttacggccatgctctgcataacgttcaaattcttctggtgttacaaaacggtcaattggtgcatgctgtttagaaggctgcaagtattgaccaatagtgacatagtcgacatcgtgagcacgtaagtcatcaagcaatgcaatgacttcttcttcagtttcaccaatacccaccatcaaaccacattttgttgggatgtctgggcagtattctttaaacatttttaataggtttaaagagtgctgataatctgaacctggacgcatcgctttatatagacgaggtacagtctcaatgttgtggttaaatacgtctggtggacattcggtcataatgcgtaaagcaatatccatacgtccacggaagtctggtactaaaatttcaagtaatgtatttgggctaagtgcgcgagcttctttaatacagtccacaaaatgttgtgcaccgccgtcaagcaagtcatcacggtcaactgaagtgattactgcatatttgagcttaagattggcaattgtctctgccatgtggcgtggttcatcagggtccaatgcatttggacgaccatgcgctacgtcacagaaagggcaacgacgtgtacaaatatcacccatgatcatgaatgttgctgtaccaccgccaaagcattctggaaggttaggacaagctgcttcttcacaaacggtatggagtttttgagcacgtaaagttgttttaatacgctgaacttcttctggtgccgtcatcttgacacgaatccagtcaggtttacgcggcacttcaaccgtaggtacaacttttacaggaattcttgcgactttttctgcgccacgaagttttacaccctgttcaggtttacggtgttctgacatatttaacttttccactcgtttatagagacattgacattgtattatagcggacttctacaagtaatagcggaaaataactattcatataataaatgtggctattcagaaatatagggttgagaaatacataaattcaccgcatattagccataatttattataaaatatggtcattcaacagaggaaggagctttcaatgccacgtaaaaaagaggtcgttagtgggaatttcgttaagtacgatgcggtagttctcggttctggacctgcaggtgaaggcgcggcaatgaagcttgcaaaagctggtaagcgtgttgcaattgtagatgtacgtgatcaactcggtggtaactgtgcacacgtaggaaccattccaagtaaagcattacgtcaaacagtttctagcattattcgctatcagcgtgatccaatgtttcaaaaagtaggtgaatggaaacagttcactatgaagcaggtcttgcgtaatgcacacaaagtgattcaacaacaggttgatactcatacgcgcttttatgaccgtaacaaaattggtgtcttccacggtcgtgcatatattcaagacaaaaatacagttttagtttttagccacgaaggcattaaagaaacaattatctgtaagcaaatcgtgatcgcgacaggtagtcgtccttatcatccgcaaggtcttgattttgaccacccacgcgtatttgattcggacaaaattcttgatcttgattactcaattcaaaaaatcattatttacggcgcaggtgttattggctgtgaatatgcctcaatctttattggtttagaccataaagttgacttgatcaatactcaacaaaaactcttaagttatctagatgatgaaatcgccgatgctttgtcttatcacttacgtgaacagggcgtgttgattcgtcacaatgaacaaatggatcatcttgaaacatttgatgaccacgttgttctacatttacaaagtggtaaaaagattaaagctgatgcgattctttggtgtaatggtcgttcaggtaacacagaaggtttaggtcttgaaaatgttggtttagtaccaaatagtcgtggtcaactttctgtaaatgatcaatatcaaactgaagttgaaaacatctatgctgctggtgacgtgattggttggccttcacttgcttcggctgcctatgaccaagggcgctgtgctggtgcaaacatgagtggtgaagatgctaagccagtacgtgatatccctacaggtatttataccattccggaaatctcatctattggtaagaatgaacaggaattaacggaagagaaaattccgtatgaagtcggtcaggcttctttccgtcatttagctcgtgcacaaattaccggtgatacagtaggtgagttgaagattcttttccatcgtgacactttggaaattttaggtattcactgttttggtaataatgctgctgaaattatccacattggacaagcagttatgcacagcccaaacaatactttgaaatattttgttgaaacgacatttaactatccaacaatggctgaagcataccgtgtagctgcacttaatggtatgaatcgtttattttgattttaaataagtttttcatgaaaaagcccacaaacttgcgggcttttttatttttattagaccatatgttttttatatttttatgacaatgtacagagtgatttcagcgtctcatctctttagtgtgcacaaaatgcttgattaaaatattcaaacaaatcaggcgtctgtttccataaaacaatagaaaaaaccagaagagctaagatgaggaaagtcataattgttttcaaaagtacggcattatgcgtcatgaataacagcctcctcatttacaaagaaatgtacgattacccctaatatgctcaatgcgatagaacagagccaaatcacattgtaattacctgttaaatcatggttaacaccaccaagccaaccaccaaagaaagacccgacttgatgggtgaaaaatacaataccacttaacattgaaaggtatttaacaccaaacatatttgccacgataccattggtgagaggaaccgtagaaagccatagaagccccatgataataccgaaagcatatactgtataagtgcttagaggtaacaataagaaagcaatgattgcgatgccgcggctaccataaagtgccattaataacttaggtttcgagaaacgatctcctaaccagcctgcgccataagtccctacgatattaaataatccgactaaagcaagaaacaccgtacctgtagcggcatcaaagccgtggtcgattaaataacctggtaggtgaacacccaaaaagacaacttggaagccacatactaaaaagcctaaagctaaccaccaaaaaggtttatgttttctagcaatattcagtacttgtttaaaggtgagctgaggttgggcaattgcttttggggtttggttgcttggcccttttaacatccatgctagaggaataataagagcgattaatagcgcacttaccattaaagctgacgaccaccccactgttttaagtaaaagaagggtggaaggcagcataataaattggccaaaagaaccggctgcactggcaatacccattgccatacttcttttttctggtggagcagctcggcctactgcgctaagcaaaactgtaaatgaggttgctgataaagctaaaccaataataagacctaagcttaaattcaaaatgagtacacttgagctaaaagccattaagagtaagccaagggtataaagtaatccgccgactgttaccacaactttactgccatatttatctgcaattgccccagtaaaaggctgaactgcaccccagattagattttgcatggcaattgcgagactaaagacatgctgtccccaaccgaactcatgactcatcgggactaaataaagcccaaaaccatgtcgtacacctagtgacaaagccaaaataatggcacttccaatgagcatataaatgagtgattgagaaaactgatggcttgttttagtcattgtgagtagaaaattataagaatgtgataaatcattgtagaagatatatcgaataatatcgatatatctataaaattattttaagaaaagttaaaaagtatcttagagattgtggactattatgagagaggggaagaagcaaaaatcatttttgatttctgcttcttatcagaattaggctgcggaattgcgttcaagtagagcctgttcaaaaagtactttttctttttctttgtgctcggttgtgaagcgaatcaaaattacactacagcctgcaaccataaccagtccacctaaaataaatagacaagtttgaatatcaagtacgccttttagtaagaaaccagctgctactgcgcccacatttccacctgcgccaataatacctgcgacgccgcctaatgcatttcggtcaataaaagggactagtgcatatgttgctccgcaagccatatgggtaaacaatgcaaaaactgtcatggaaataattgcaagagctacgacgttcatttgagagaagagtattaagaataaaccttcgcctaaaatcatcagtacaagcactttagtacgtccgtctaaaccttttttaagtgcgactttatcggaaataataccacctaatgcacgtgcaaataaggcaagaagaccaaatatacctgcggttaaccctgctgtttttaaatccattttgaattggtcaacatagtacattgccgcaacattatggatgaaaatttcaataccaaagcaagcaccataagcgaggaataaaatccagacacggtagttacgagccgcttgcattaagattgccatgccaccctttttaccgctacccacctcaataccttgtgcacgaacttctttaaagtttccttgaggacaatcttgggtaagtttccagtaaagaaccccaacaattaccatcattacgcctggtacgattaatgcaacgcgccaacccatagtttgctcgacaccgaacattacaattgcaccgagtaataaaggcattagagcttgtgttgcaccaccgccagcattaccccaacccgcagcagctgcatttgctgtgcctacgacatttggtgcaaacatgatactggtatgatattgcgtaatgacaaagcttgcgccaattgcaccgatgagtaaacggaagaaaagaaaagattcatagctgttggcagcggcaacaccaaatacaggaatactgccaagtaagagaagggtggtgtaagtaatacgcggaccatatttatcacaaagtggtccgacagcaagccgcactaaaattgtaattgcaacggcggcaatattaatattggcaatttgatctttggttaagccgaactcacctttaataacgggcattaatggagcgcaagcaaaccatgcgaagaagcagacaaagaacgcgagccaagtcatgtggaaagcacgcatagctggggttgaaaaactgaataatttaatttcagtcgctttttttgcatctaaattaatatttgaagacatacgccgtccccctgaactgaacgaaattttaatttgcacgacaaaatgaattgtctatttgcataccgatcagagcggacatctttggccgtcttggtttatccattgaatcgccattgattcatcatgtcataaataaagcaaagggcgtgccaaaagataatttttactaaaaggaaaatcttagtttttaattttattaggttagttgtctaacataaaaatcattagagaaaaggaattaaaagaagaggtgttaataaaaaataaagaaggttgaacttagtaaacatgatcctaaaaaatgctcatttttttggcattttggtttaaaaagaagcaattttggcaggataaataaaaagctataaaagcttaagtaaagcttttatagcttgtgtgcttttgagatttagaatcggtaaccaataccggcataacctaatattggattaatttcgatatctgcttttgcattaattaactcaccgtacttggcatcattgactgtaatagttgtatccgtttttaagtgagcataagacacagagccaacagcataccatttgtcattaaagtcataggtgaaacctaaagttgctacgggtgcaattgcgtcggatgcctcaagatctactttaggatcaccagagctagtttttctttctaaagcagcacccgatttaccatctttaatattgacaatcatatgcccagcatttactaagtcattttcaatttcaggatttatttctaattcattgaaatatgcatacatcacacctagtccaacataaggtctgaatttatttacgccagttttgccaaagtgatattgtaattcaaatgctggtgtccaagctcgagctgatgccgcactcccatgtgcttcaagatcggtaataaaaatattattttcaagttccatagaaccaagaattccaccagcaggttttgcagtagcggaaaaaggtgcataaatcttacctttaccttgtagatcgactttaggcggaatccctgcttttacttctaatgaaatattatctgtaaaaaagtaatttgtcataagaccgagagtagttacatcatctgcttctaagcccgtattctcagcctcccattgactcaaaccgcgaatttcagctgttccacttaaccatgcgggaatagtatcagtacctaaaccaataacatcaataagttcttcaagaacgacattactattactatcggaaatattgtcttgaatagtttttactttaatatctccgaccttagattgctcattttccttaacagaagtgttaatcctaaaaggctgggcttttcctgttggtttgacatataaaggaccagctgagactgaaaaacgtttgaaaccatcaccatcttttaaactaaaatatggggaagcggcggaagtgactgttggcagagcaaataaggcagctgtcatacaaaataatgactttttcatcataaaaggactccatgtccgagcatttgtttactgatttttattgagcccaccataacgcgttttattgaaataattgtgtattaaaaattaataattgtaatttttttgaaatatttgtttatatttggaaatatttattaataaaaagtacaaaataaaaaagaaaaggctacataaagtagccttttattaattttgattaaattattgattgaagcgtgaaagatcttcttctgggcgagctgttaatacttcaatccctgttttagtgactaaaatagtatgttcatattgagctgaaagtttatggtctttggttacaactgtccatttgtcaccaagcaatttggtttgccaaacaccggcatttaccataggttcaatagtgaaagtcataccagcttctaaacgcatacccgtaccagcttggccatagtgcaacacttgaggttcatcatggaaaacggtaccaatgccatgaccacaatattcacgtactacgctaaaacgttctgattcgacatatttttggatggcatgtccaatatcgcctaaatacgaaccatctctaactgttgccattccacgatacatcgcttcttgagctactttacataaacgatttgccagaatagaagtttcaccacccacgatatacatcatgttggtatcgccatgataaccatctttaatgacggtcacgtcgatgttaaggatatcgccgttttttaagattttattttcagaaggaataccatgacatacaacatggttaaccgaagtacagatagagtgttgaaaagcagggcgtcctggcgcaccaccgtaacctacacaggccggaatagcgtgctgtacattttcaatatgattacgacaaatcgtatcaagctcgagtgtgcttacaccagctttaatatgcggcttgatcatatctagaacttcagccgccagtcgtcctgcaatgcgcattttttcaatttcatctggagttttgattaatcgacgtggagctgtataagtactgttcatgatctctaaaaacttttggtaatttacaagcgtctatggtataaatagccgcccattttatcaaatgcttttcgtgaatatcttttacgaagaattttgataggtggagtaaaaatccgcacatatatcgtcacattactctgggtgcccgtaaaaaggtggagaatgcggatatatggaggcctaacccaacttttaaggtaaagaaaatggcagattacaacgtaagcatgcgcgaccttcttcaagcaggtgcgcactttggtcaccaaactcgtttctggaacccaaaaatgcgtcaatacatttttggcgcgcgtaacaaaattcacatcatcaaccttgagcacactgttcctgcgttaaatgatgctttgaacttcgctaaccaattagcaagcaaaaagaacaaagttttgttcgttggtacaaaacgtgctgcttctaacatcatccgtgaacaagctcaacgcgctggtcaaccatacgtagatcaccgttggttaggtggtatgttgacgaactggaaaacacttcgccaatctatcaaccgtttaaaagatcttcaaactcaatctcaagacggtacttttgctaagcttactaaacgtgaagctttagaacgtactcgtgagatggaaaaacttgagcgctctttaggcggcgttaaaaacatgggtggtttacctgacgcattatttgtaatcgacgttgatcacgaagcgattgcaatcaaagaagcgaaaaacttaggtattcctgttatcggtatcgttgatacaaactctaacccagacaacgtagattacgttattcctggtaacgacgatgcgatccgtgcagtaactttatatgcttcagctatggctgatgcaattcttgctggtaaagaatacgctcaatctcaagcgaacgctcaagcaaaaggcgatgacgctgcgaaagacgcttctgaggcttaatgcgttttgacgcaggcttgtcatttttgcgacatgtaatggtggcaaattaagcgtcgagagtgcaaacggcccagagtttctttgggccgtttttgttgaacagatttattttctaccgattttaggagatcaacatgactgcaattactgcaagcatggtaaaagaattacgtgaccgtactggtcttgcaatgatggaatgcaaaaaagcattaacagaagcgaacggtgacatcgaacttgctattgataaccttcgtaaatctggtcaagctaaagctgctaaaaaagctggcaacattgctgctgacggtgcaatcactatcgttcaagacggtaataaagcgatcttagttgaagtaaactgtcaaactgacttcgttgctaaagacgaaaacttctctaactttgcacacacagttgctgctgctgcattagctgctggcgaaactgatgctgctaaaattgctgaattaaaattagctgatggccaatcagttgaagaagctcgtatcgcgcttgttcaaaaaatcggtgaaaacatccaagttcgtcgtgcgaaaatcgttgaaggcgaacaattggctatctataaacacggtttaaaaatcggtgttgtagtttcttatactggtgatgctgacactggtaaaggtattgcaatgcacgttgctgcattcaacccagtagcagtaaatgctgaagctgttccagctgaccttatcgctaaagagaaagaaattgctgaagcgaaagcgttagaatctggtaaaccagcgaacatcgttgagaaaatggtaactggttctgttgagaaatacttaaacgaagttgctcttgaccgtcaaatgtacgttatcgacaacgagaaaaaagttgctgacgtattaaaagcgactggtacaaatgttgctaacttcgtacgtttcgaagttggtgaaggtatcgagaaaaaagctgaacttagctttgctgaagaagttgctgctgctcaagctgctgcgaagtaattcgtatcttcaaaaaaagccccctatggggctttttttatctctgttgaaaacggaatataaagatgacaaataaaaagaatctaggtattggcggcataattgttttattgattgctgcatatttgggtctggacttatctgggcataaaaacaattcgacaccatcatcaagcatacctgcgaatcagcgtactgaaacgacgttttcaaatgatggagtagataccataaaggctgcttatgaacgtagagaaagtaacgttcaagtgcagggtagtggtcgagtaaaagcaatcttaaaagaagataatgatgggtcgagacaccagaaatttattctgatattaaaaaatggactttcaattttagtagcacataatattgatttagcaccaaaaattgaagatttaagaaagggtgatattgtcgaatttaacggggaatatgaatataacgaaaaaggtggagtattacattggacgcatcatgatccacagaaccgccatgaaaatggttggttgaaacataatggtcgtatttaccaatagaaaataggatatccatttccgcataacagcaattttgttctatgcatctttttaaaacatgctatgtttttttgtagataaatagatgagatgtatatatgcaccgggaacaggctgactacttgcatttgcgagagttgggcggtttagaattattaaaagctcattatcaccaaacacaattttcaaagcatactcatgaaggatattgtattggtgtcattgaagagggtgctcagtctttttttaggacgggtcaactacatgttgctcctaaaggtgacattattttggttaatgcagatgaaattcacacaggctcatctgctgttgaatcgggctggcgttaccgtgcaatctatcctacacccgaaatgcttgctgaagtaagccaagatttttttgagcaaggccatggggcaccttggtttccgcaagctgtaattcaggacttgggattatctcaacaactctgtttattatttgatttattagaacaaaaagacaattttttgcttaaagaaaccatgtatttatcaacattagcctgcttaatggtacgtcatggtaagtcaagacacaccttttgcgagttgccagaagcttattcaaaagtattaaaagttaaagatttgttagctgatatgcctgaaaagaatttttctttgcaggaattggctgatatggtcgggttaagtgcatggcattttttaagacaatttaaaaaacatgtgggtttaccgcctcatgcatggttagtacaggcgcgtttgcaaaaagcgagacaattattaaaacaaggcgttcaaattgtaatggttgcacagcaatgtggtttttctgatcaaagccattttaatcgtcattttaaaaaggcgatgggtgttacaccaacccaatatgtggcgagtcttaatctttaaatttatttgcagtgctaaccgcaattttgttcaagcgaagctgagctaaataccagaaaatctataaataataactgttatagatgtctagggatgaatactcatttaaatcaatctattagattttctaaaagccgaccaccgcatctttttttacgaggagcgatagatatattgccactatctatttcggttataccatgggctattttagctggatcaatggcaattcatgcgggtttatcattttataaagcactagcgatgtcaggaattgtgtttgctggcgctgcgcaattagtaagtttaagcatggtgatggaaggtgcatcgttattaaccatctatgtcactattttctttcttactgctcaacattttatttatgctttaactttaaggaatgacgtttctattttacctctctcaaaaagactaactttagggtttctgcttaccgacgaattatttgcagtaagtgttcctaatgagaaaaaacatcctcaatacttattcggagcaggtctttgcttttatttattttgggtggtttttagtttagttggtattttattagcaacggcgctacctaacttattaaattatcatttggatttttccattattgctatttttgttgccatgattgttcctatgtgtaaggggaagcctgtaatggcaggcattttaatgacttgtgtcagtggttttgtacttaagtattttcatatagaaggagccattctaatttctggtttattggggatgtttattgcggtaatagtcgaaaataaaataggagaaaaataaaatgtcatggctcatgattttaggactggcagctatcgtattttttaatcgttattattttttagaaccaaatgtaaaagttaaattaccagtacttatgaataaaatgttgaattattcagctccttgtttattaagtgctatttgtattccagtaattttttttgaaaataatgaattaagaggatttttagataatccttacttatacgcaacgatattttgtactgtcgtggctttctattttaaaaaagtgttaccgagcgttctgctgagcctagcatttttttattttataaattttctaataaatcattaagttaaagctgaatctttttaggattcagcttcttcaaaatttattgagcaatcagtttcttttgacggcttttccaatgaggtaatatctttgcaagataagcatccatacaccagaccggaccaatcaagagaaattgcaaatctttaaagaaagaaggtttttttccttcaactttatgtccataaaattgtccaatccaggcaaacacaaaaagagcaatataaaatcctacacctactggcagaacataaataagccatgccatcacaacaagtagagcagccattgctactgcaagtacaagatcaagccgagcataaaaaatgagggtcagtactacgagtaaagcggtgagtaaggcactaaagtgagcaataattccaataatcgaaaataaaatagctggaacacatacccagtgaattttcttatttatcgggttttgatgactttcactatattcatcaaaccattcaccgatagatttcatagaccttgttctccttgtctaattttgagtcattctttttctgtttatattttatcctctcgttatcgggagagacaagacaagttgtatatcgacatgtttgttaaatcaagtaagcctaaaatttaaagtttattcatttcggcacaaaaatgaaaaacagcactgaagaaaggggaggatgagctcaaaaatttcaggttatttatttgtgattttgagagagtcgaatcctcaaaaaaacctcattttcatgaagaatgggaaaataatagaaaaatactcaactcatcttgtcttaaaacgcgttaaacaactctttttagactaaagtggtactagggtagcggaattattttaaaatggctgtaatcgaaaaatatgcgcaaaaatcgataaagaataaatgagtgtgtttttgggttaaaaaataatcatttttgtaatgaaaaaacgaatctagacacaaaatttttataggtttttttgctctttttatattaaaaaagccacaacttaactggtggctttttcatgaactcgaggagtaatcgcttatgaagtaggaccgtctacacgctcaatacttactttagcagtaccagcattggtaataccaaggcgtttagctgcaccgtatgataaatcaagcacacgattaccatggaaaggaccacgatcgtttacttttaccactacgcttttgccattgtctttgttggtgacacggatataacagttaagcggtaagctacggtgagcagcagtaagtgcattcatatcgaatgtttcaccacttgcagttttacggccatgaaattgacgaccataccacgatgccatgccagtttggctaaacttacgaacagtatttgaagctactgtgttaagtttttcaatcactgaaggctcatcttcagggatttcaattttagctgcgatagcttgacgacggatttgatcgccagaacgttcagtgattgaaagactgttaatgttagagaaacgagaattaaagttttgagtatctttactcaacacacgagcagctaaatttgcatttggaccatctacatcgctatttaatgatgatgattgcatcatttcagcgtgcagtggggccatgcttaaactagccgtcagtgcaagaatgtatttcagcgataactgcatttatataaactcctgagaacatgcactttttcatttagccaaagagctaaaaattgaagtgaacatgcctaattattcacttttgcaattgcttgattggggtggataatattcatcgcttacggagagtgtctagtctttaacgagaaatagttacaaaaagggcaaaaacttacagttttaggttaaaaaataaccgaatatgtaacaaggtatttaaaatgtttgtattgtgatcgatttaacaaaaatatttattgacttttacataaactcatcaaaaagctagcctatcggctagctacttctgtacctaacaaccatacggcagtcgcatacattcggcttttgttataagtcgtaattacttgaaagttcggataggttaaatagtaaattggaccgttatagtcttgtaattgaataacatttaccatatctaagtcatcaattttgactaacggatttaaaggggaaatcccttgattttttagtgcaccatacggagtgggctgggtcaaatctttagcaatgatactttccggatttgaacctgtgtaacgagccataaaaccaataggttgatcgcgttgccagccttgttttgctaagtaatttgcgattgaaccaatcgcatcttctgcagagtttcgtaggtcgatatgaccattaccatcaaagtcgaccccgtacttactaatgttgcttggcataaactgcgggaagccaatggcaccagcataagaacctacaatactattggttggataaccttctttgtaagtccatgcaatgagagcagctaactcatcgccaaaatattcagcacggcgtgggtagccaaaagctaacgttgcaagtgcatcacgagtaataaacgagcctttattggctccataacctgtttcaacacctaaaatgcctagaataaccgcttgagagacaccaaattgttgttcagcacgattgagagcatcggcatattggtttttaaagcggacaccacgttgaatagtaccttcgactaaaaacatagagcgatagtcgtaccaaggcttactttcaccagggcgagtcataatatttataatgtttggtaaattttttgcaccattcatagcggcgtcaacctgttcaccgcttaagccataagtgctcatggctttttgtttaaaatttaaatagttaggatgagttacaaaatcattggcctgagcaaaatgacttgtgctaataaggccagtacacaaggcaagcacttttaaagttttattaacaaattgagacaacatatcttttttaaattccagattatcgatgtgtatgaatagacatgactaaaccaaaagtggccattaaagtaataatagcggtaccgccataactcataaaaggtaagggaacacccactacaggtaaaataccactgaccattcctgcgtttacaaatacataaacaaaaaaagacaaaccaaacgcgccagccactaatcggccataattatgaaagctttgtaaaccgatttgaaatgttctaaaaataatggccgaataaagaattactaatataagtacaccaattaaaccgaattcttctgagtaagcagcaataataaagtcagtatggccttctggtaagaagtgtaaatgtgattgagtaccttcgaggaaacctttacctgagaacccaccagaaccgattgctgttttggactgaataatgttccagcctgttcctaaagcatccgcttctgggtcaagcaacgttaatactcgttgacgttgatagtcgtgtaaaaggaattcccatgcaattggaatcacaatagctgcacaagctgctgctgcaccgatcatgcgccaagatagcccacttaagaacagtacaaaaatcccacttgctaatactaatagtgatgttcctaggtcaggctgttctgcaataagtaaaaatggaacaccaattaacattaaagacaaaataacctgcgagaagctaggaggaagaggtttacgagctaaaaaccatgcaaccatcattggcatgccaattttcataaattcgctgggttgaacactcccgaaccctggaatatcgatccagcgttgagcacccatgcgaacttcaccaaaaaccataacgccaattaaggaaaacaggccaaataaataaaaataaggtgaaaaagcttgataaaccttgggtggaatttgcgctaggctaatcatgaccagaaagccgataccaaagctcatggcctgtttactgacgagtcccacatcttgtgcagatgcactataaagtaccgttaaacctaacaatgcatttaggaataaaaataggcataaccaagggtcaatatgaagctgctgccagcgtgaaggttgcatggcagtactaaggccatctcgaggagcttggcgtaaaaatttatattgtggactaggagacatgcggctttaactaaaggtcaatcagtgcttggcgcatgctaacataaacctgatttatgacaatgtatatcaatattttgcaataaaaaaacctggctctcaccaggtttccgatagactattttttattagttaaagaatagtccatcatgatattcagccatcgcttttagttcagtgcgatttaaacttggaatgagtttgtcgatcgcaatatgaactgctttagttacagcagcagcgccaatatcggctgctttacgcttaatcatgcctaaatctaatgttttattaaagtcagacataaaatgtctcaccatagcatcaccgaactgtttatatagttctgctaaggctgctttattaatgtcattacccgcttgaagctcggcaaaattatgcttcaagttggtaactaggccagcatctaaagctacgccaactttatattggccttgcggatctttaaataagcttttctctgaaaactcaactgactgtttaaccacatcgtttggcgctttgctgagtaattgctttaaaagcacggcaactgttgatttgacataaccagctagtttttcggcagtatctcttttttcactcgctgggaaatgttgtactaactgagtaagtacattttcaataatttcttcattgagttgtaaagcgattttgtctcgaagtggatataacggttcactagaatttttattcgcaattccagtctgtatatcgttcaataagccttcagaaggggtaaaaccaaaaaacggcatggtgtatcctcaaattattcgttttattgtcgtgccaatcgaatcggttttggcatccatgtaagatccgatactcggcaaggattgatatcaagtccaccgcggcgagtataagttgcataaaccatcagcttttcaggttgcaaattttgccaaatatcggcaaagatttgttcgacacattgttcgtggaaaccgttatgctgacggtacgaaataatataggctaaaagactacgataacaaggttttttgcccttaaaacgaataaaaactgtcccccaatccggctgacccgtgactgggcagttacttctcaaaagatgagaatacagttcaacttcgatttcttcacctgactcatcaagttttaagagagtagcatcaggatgttgttctaaacgctctggcataagatcatcaatacagatcccttgaggtttagaaatctctaaatcatctacttgaaatagggttaattcaacttttgcacctgccgcagcagatagatctttttcaactgtttcaatgaatgactgtgtagagtcaaactgagtgaagttaagactattgaaataaagttttaatgactttgattcaattaaattcggtgaagaagctggcagtgtaattctgccaatagcaacctgtggaataccgtgagcattcaaccaagaaatttcgaaaacgtgccaccaatctttaccttgggttataccttcgatatgagcatatttttcacgagattgagcacgtgcaattggaaataacacatcgggttgatagctagttggatattgggtttctttacccaataaagactgttcgacactcattcacgcattcctgaaccacgagcaagtaaataataagcaattccgtaaagtacagcacagcataatgtcacgatgattaaagagaacgaaacgttcacgtcactatgacctaaaatgccgaaacggaaagcatttaccatataaacaataggattaattaaagaaagtttttgccaaaaaggaccaagtgcactaatggcataaaacacaccacctaaataggtaagtggagtaagtacaaatgttggaataatagaaatatcatcaaatgattttgcgtagactgcattaataaaaccgcctaaagaaaataaaacggatgtaattaatactgtatatatagttacgaaccagttatggataaaaagatcagtaaaaaacatactcatcgcggtaacgattgcaccaaccaagacacctcgacaaataccaccaataacatagccccacaaaataatatgcagaggcacagggctcataatcagctcttcaatgcttttttgaaatttcacactaaagaaactcgatgatacattggcataactgttggtaatgacagccatcatgatgaggccaggtacaataaattgcatgtaacttacgccacccatttcaccaatacgtgagccaaccaaattaccgaaaatgacaaagtataaactcatggtaattgcaggtggtaataaggtttgtggccaaatgcgtagaaatcggcgtacttctttacgaactagagtccagagggcaatttgcagttggttgaagttcattttgccgctccttcaagatttttctcgaccattttgacaaatagctcttcaagacgattcgatttatttcgcatgctgcgaacacgaataccttgtgactctaaaagttggaataaatcatttaatgtatgtgctttatccattgttacttctaaagtactactatcaattaaattgaacttcacaccaataatattgagctggagtggggcaataggttcagccaaatcaaaaataaaagactcttcactcagctggtttaagaaacttttcatgctggtatcttctttaatgacaccacggtcaatgatggcaatttgacgacacaacatttctgcttcttcgagataatgtgtcgttaaaataatagaagtaccgttttcgttcatttcagtcagaaaatcccacatagaacggcgtaactcaatatctacacctgcagtaggctcatctaaaataagaagtttaggctcatgcatcatggcacgggcaatcataagacggcgtttcataccacccgacagcatgcgtgcttgtatattacgtttttcccataggcccagtttttctaaataatgttctgcgcgcttttctgcaatctttctatggataccgtaataaccagcttgcgttactaaaatatcaaatgctttttcaaactgcccaaagttaaattcctgagggacaacgccaagctgctgttttgccaaggatggatgagtgtcgagattatgtccaaaaatctcaactgttcctgaggtctttttcgtgagggagctgataataccaatggttgttgatttgccggcgccatttggacctaacaacgcataaaattcaccttcaggcacagtgaggttaataccttttaacgcctgaaaaccattacgatatgttttggacaaatctcttaaaaccaaagcatcagtcatgaaattctcacattatgaaagaggggtatattttgagcgataatgattaataaaccaagtaaaatagtcggaattttataaaattgagataaatttatgaagttattatatataaaatggtgcgctcggcggggatcgaacccacgaccccaggcttcggaaacctgtactctatccaactgagctacgagcgcatgtgtggggcacatcataggaaaaaaacacttgcaggtaaagcacgaaatacgtaccaagtgaatttaatgcttaattaaacagcagcttgttatgttttagttcttttgctgaatgagctgaattgaataattaatagagtgaagcgtatgcgccagctcatgagggggaatccttgactcttgcaaactggtaatccattgcatttggcacatttttagttcttgaagatttttaatttgttctattttttgaataagtggtttggccataagcccacagtattggcttaagctttgtttcattaatagttgtatttcttcaaaagtaagttgttgaacaggaattggtggctgagtattttcaatatttgaagaatggcatgatggttctagagaaactttaatttctccagtcaaatcggcactttcattttcatctatggtgcttttttgttgcgcttttacttctaaactcgtggtaggtggtactgagagagctatctgttcagtaaattctgaatcgttttcactaataggggcaataagctttaagtcaataagttgttgaatgagttctggtggagcaatgcgttttttaaactcggtattgagactttgaaaatcttcatgatcaattaatagaagtaaacgtctttgtttggcatttaaagcaatattacgttgttgaagcgcgactcttcccaaattggttcgataaaaaccagccatcatttttccccaatataaaaatgaagcagcctgtttgattttttctatcaaacagtactgttcttaataaaatataaatggggctaacgataaaactcaaaaatgacaatatgatgaagaatttatgaatatcatctatttaggccgttaaaatgcactttctaatgctttacgtaggtaaacgtccagctcgtcttggcgcaatagccattgaatatagtctttagggagttcagcaatagctgtacctttatgcttgccaaagttaattgttgtgggaatacgtgcttcttcagaaacacggtacaactcttcaatgtcatgaatatttaaatgatagacaatatgcatcaagatattggcagttaaaataatatccgcatcggcacggtgcgcgcctttgagtaattcacgagctttactgctgccttgagaaatcatatagatcagtgctgagatattatgcgcttctgcatcaggccaggttttacgtgctaaagctagcgtacaaattggtttgatatgagaaacatctacaccgcaacgcgcaatcgcggcaatatcataatcaatattgtggccaataatataagttgtagtatctggcaatttaaaagttttatagtggggctgattttctaaatctgattctaatatatggtgtactgccatagctgcgtaagagatgggggtcccaacttgataaagttgatcaaacaatttgcttttatctaaggtgagcttgcctgcattaatttcaattggggcatatgcaatttcaataggcaaaccatttagtgtatgtgtttctgtatctaaaataatggcttgcatatccggccctttaaacaattacgagtaaccaagaatgttaacagttggcctcgcactttaaaacctgaagtgaggcggaaagtggtgagaacgacaatttatattaaaaatagaatttttcagggattgattttgtcgaatagaacttgcggaaaattaagattaggcgtaattgtttttaagacattagcgaatgttgattaaaaaactaaagcacaacaaaaatggaatttaagggaagatataccaatgaaaatgaaactattaatgacgagcgttcttagtacgagtttatttttagtcgcttgtggaggtggaagtagtgatgatggcccagctactactaatccatccggaactccaaccaataatattcaaaatccagttgttaaagttgaagcctatacaagtactaacttaggatcagttgccgcagaaagtagtattttaacttataaaatgttaggtcaaagtggacaagaagtgcaggcaacaagtctagtgtttacaccaaacactcaaccaccagtcggcggttggcccattgtagtctgggcgcatggcactacgggtgtggcagatgtatgtgcaccaagtaaagcagctttagcagacagtacaaaagatttaattagtaaattattagcagcaggttatgttgttgtggcacctgattatgaaggtttgggtaccccaggtatacatcctttcttaaatgttaaaagtgaggctttttcaattaccgatgcagtggttgcaacacgcaattatttatcgcaacgtaatttattaacttcgaaaaaatgggtcactgtgggtcattctcaaggtgggcatgctgcattaggtgctgcacaatatgcgagccgtgcacaactagactataaaggtacagtagcggtagcacctgcttctaatttaggaagtattcttttaaatggagaattaaaagctgcaagtgcatcagtatatgaaaaaaaggcaatctatgcgcagcttgatgcatttacagcgcttgttgtagcaggaattcgtaatacccatccagactttaattatcttcaagtatttactgaatctactgcaaggattgcacaaggcgctgaaggtttttgttatgaacctttactcggggattttagcgctactatgcaagtttatattgcaactcatggggaaacattagatggttatacgcgtacacaacctaattttatggctgtgccactagttaaaacatttttagataaagattcgcagccgttacaagtaaaagttacgacaccaatcattatctatcagggtttagcagattcgacagtacctaaattggcaactgatctattgatatctaatgccactactgtaggcactaaaattaatagttatgtgacgggtaactgggatcatggtacggcgatgagtagtaatgtagataatatcgttgccgatgtgaaaactttaatgcctccgcaataatgaataaatatagcgaagcccaagtttggctcctaaatgagtaaacttgggtttctttgctaatttctaataacttgagtttcccaaccatcatattctgcattaacttgttgagcgaatttccaaagttgtagcgtgcaagtatctattgcatggtggtttacatgatcaattctagaaatttgcaattgataaggcgaatccgttctgtcttttatttcattttgttgaacaatttcaaatcctaaaggcttaatcaattcgaggaagattgcttgatcagatttatttttaaaataaatccaatgatctacaggacgggcaatttcaagagaatctccatgtttttctaaattttcgataacagcattatttgaaataatctgcatgatttctggacttggatacatataatcaaaataagttgaccaattagggtctgatttttgaccgaaacgataattatagtttggataagattgcatgacttggtgaatgatgtggttaacatctagtccatcctcacaataaaagtaaaaatctctcaagtgattatgtgttagacgtccggcataaaggataggatgtgttgcaagtgatagagtgatttgatcttcgatttcgatgagttgatcaaattcttcattagacgataacccatcttctctagaatgattcatttgtatttcaagccaaagcaaaatcggtttagatgttagtggagcaatttgggttaaagctagatttagaaagtaacttgctggttgttcatctatttgacagatgtatatattccaatcttcgggaatttctaaagcttgatcagttgcttgctggtctgttctaatatgcttttttttgaaccaaaatttatcaagtaatcccatatagatatcctttttatttgttttatagcataactaataagctgaagaaaattcatagataattaactaaatatcaatctgtgcaaggacaaacttcgtgttacaatacgcaccaatcttagcacggcttaaaagccctaatttataggacccccgctaatgtttgccaatatttccatttctgaatttgatccagaattagctcaagcaattgcttctgaagatgagcgtcaagaagcacatatcgagttaattgcatctgaaaactattgctctcctgcggtaatggaagcgcaaggatcaaaacttacgaacaaatacgcagaaggttatcctggcaaacgctattatggcggttgcgaatttgtagatgttattgagcaaatggcgattgaccgtgctaaagaactttttggtgcagattacgcaaacgttcaaccacacgctggctcacaagctaactctgctgtttatctagcgcttcttaacccgggcgatacagttttaggtatgagcttggctcacggtggtcacttgactcacggtgcaaaagttagcttctctggtaaaacgtataacgctgttcagtatggtctaaatgctgaaactggtgagattgattacgaagaagttgaacgtttagcattggaacacaagccacgtatgatcgttgctggtttctctgcttatagccgtgttgtggattggcaacgtttccgtgacatcgcggacaaagttggtgcttacctttttgttgatatggctcacgttgctggtcttgttgctgctggtgtatatccaaacccagttcaaattgctgacgtaacaacaacgacgactcacaaaacgcttcgtggtccacgttctggtttaatccttgcgaaagcgaatgaagaaatcgagaaaaaacttcaatcagctgtattccctggtaaccaaggcggtccattaatgcatgcgattgctgctaaagcaatctgcttcaaagaagcaatgtctgacgactttaaagcttaccaacaacaagttgtgaaaaatgctcaagcgatggctgaagtattcatcgctcgtggttatgatgttgtttctggcggtacagacaaccacttattcttgttatctttaatcaaacaagacgtaactggtaaagatgcagacgcttggttaggtgctgctcacattactgtgaacaaaaactcagttccaaatgatccacgttctccatttgtgacttctggtatccgtatcggtactccagcagtaacaactcgtggttttggtgaagctgaagttcgtgaacttgctggttggatcgctgacgtgattgacagcaaaggtgacgaaaaagttattgctgatgtaaaagcaaaagttgaagctgtttgtgcaaaattccctgtatatgcaaaataatttgtgtatataaaaaagcgccgtaaggcgctttttttattaactactccaaccgccccctaaagcacggattaaattgatgcttgcaatgatttggctgcctttcagctgagctgctaattgttcttgttgcaaaatagtgcggtcagaatcaatgacatcaagatagctaatagcaccttctcgataacgtaaatgagaaagttgattggcatgacgagaagaggagagtgcttggttttgagcctgaatttgctgatcgagaattctttgatcagataaaccattttcaacttcgcgaaatgcattcagtacagtttgtctatagttggcgacgctttcctcataagccgctcttgcttgagcaacgcctgctttacgttgtccaccatcaaataaaggtaacgacaaaatagtaccagcgacaggtcctagtaaaaaagtccgactcgaccatttacccaactcgcttaaacttgaagattcataacctaaagctcctgtaagactgagttttgggaaaaatgctgcacgagcaattccaatacgcgcattatctgctgccattgcacgctctgcagccgcaatatcgggtcgtctttcaagtaaagttgacggcaaaccggcagggagacggatactatttgcagttaaaggttgaactgccaagttaaagtctgctggtggttttcctaataagactgcaagcgcatgttctgcactggctctgttacgagcaatatttagggcagtggtttgtgcggtagcaagttcggtttgtgcgcgagaaacatctaattcactgcccagtccgtttttaaaacgaagctgcattaaatctcgtgtttcacctagcaatttgattgttcggttataaattgcttgttcggtatcaagttgacgtatcagaaaataaccttgagctacatccgcttgtagagctaaaagtgctgactgatatagagcctcttgttgctgtagatccgctgttgctgcgttgacactacttgctacacgaccaaataaatcgagctcatatgaaacattggcttgagcgcgccataaggtttgagccgaagtatgtgcattgtcatctaaaccgagtgaagccggagacggcttttggcgagttggcccaaatccggcatcaatacttggtaagcgttcagcttgagctgccgaacgtaatgcacgtgaagcctgaatatttgctgccaccgcttttaggttctgattgcctgcgatagcttgctgttcaagttcattcagttgagcatcattgtaaatgcgccaccattcaccacgagtttgttgatcggcaggttgggcaatcttccagttattatcttcaagtttggggtcagattctttgaatttgactggcactataacttttgcaggttgatattctggggccaatgagcagcctgcaaggagcaggcttcccatgagtgaggacaacaaccaattttgttttgatgtaatcaccaaatgtcctccttaatgatcgtgtgggctagctaacggcgcttcatgaactgccgcagaatgcagtttatgtttgctgttgagggtacgaatcagaacgtaaaaggccggggtgaggaataaaccaaagaatgttacaccgatcatgccgaagaatacggcaacacccatcgcatgtcgcatttcagaacctgcgccagttgaagtaaccagtggcactacacccataataaatgcaatagaggtcattaaaattgggcgtaaacgtagacgacttgcttcaacagctgctttaaaggcagtcgcaccttgcatttcaagttcccgcgcaaattcaacaattaagatggcatttttacaggctagcccgaccagtaccattagaccgatttgagtaaagatgttgttatctccagctgtcaaccagacacctgtcagagccgctaagattcccattggtacaattaagataactgctaatggtagggttaagctttcatactgagcagctaatactaagaacacgagtaatacgctaatagggaatacccaaagtccagcattaccagccaagattttttggtaagttaaatctgtccattcaaacttgataccacgcggtagagtttgtgcagcaatacgttcaaccgcagcttctgcttggctagatgaataacctggggcagggccgccgttaatatctgctgatgtgtaaccgttataacgaacgaccatttcaggaccataggtttgagttacattcaccaatgaagataatggcaccatttgtccggcactattacgggttttaagctgcaaaatatcttcagggttagcacggaaaggcgcatcggcttgtgcacgaacctgataaacacgtccaaagcggttaaagtcgttaacgtactgagaacctaaataaatctgcatagtgttgaaaacatctgtaacagcaacgccttgctgtttagcttttacacggtccagatctacgttgagttgaggtacgttaatttgataacttgagaacattggacccagttcaggggctgattgtgctgctttcataaagttttgagcagcatcgttcaaggctgaatagcctaaggcacctcggtcttcaagttgcagtttaaagccgcccatcgtgcctaagcccatcactggtggtggtgggaaaacagcgatataagcatcttgaatagctgaatatttctggttgagtgcacctgcaatagcatttgcagataagtctttagccttacgttcatcgaatggctttaaggtcacaaagacaataccggcactcgagctattggtgaaaccgttaattgataggccgggaaaggcaaccgcactttctacaccaggttgtttaagcgcagtgtcactcattttacgaatgaccgcttcggtacgatctaatgacgcgccgtttggtagctgcgcaaagctaattaaatattgtttgtcctgcgcaggaacgaaaccacctggaacaatataggaaataccaacggttaaacctagaagtgctgcatagacacccattgccgaagctttatgggaaatgacacggctgacaccttgactataacgatctgaagcacgtgaaaacacacggttaaacagtgcaaagaaacgaccgaataaacgattcataatacgtgttaaggcatccggtttagcatcatgtcctttcagtaacagcgctgccaaagcaggagatagggtaagcgagttaaatgccgaaataaccgttgaaatggcaatagtcatggcaaattgtttatagaattgccctgttaagcctgtcataaaggcaagaggtacgaatactgcaacaagtgttaaagcaatggcaataatcggtccactgacttctcgcatggcacggtaagtcgcctcccttgggtttaagcctgcttcaatattcctctcgacattttcgacgaccacaatcgcgtcatcgacgacaataccgatggcaagtaccatcccgaacagtgatagcgcattgattgagtaaccaaaagcgagcatgagtgcgaatgtaccaataattgaaactggtacggcaagcaatggaatgattgaggcacgccatgtttgtaaaaataaaataacaaccacaacaaccagtgcaattgcttcaagtaaggtatgaacgaccgctttaatactggcccgtacgaattgagtcgggtcataaacaatgtcgtatttaattgaagatggaaaatcttttgaaagctccttcattgtgctacgcacttgatcggaaacttgtaaagcattcgcacctggtgcttggaaaattggaatcgcgaccgcttgtttattatcaagtaatgaacgtaagccgtattgagaggctgcgagttcaacacgtgcaacatcacccaatcgggtaaccgcgccatcaggggcagtttttaaaatgatatcggcaaattcttgctcagtggttaaacgaccttgagcattcactgaaagttgcaaaggtgaattacttggtgatgcaccgattgtacctgctgcaacctgaatgttttgttcacggattgcattcacaatttcggtcgcggtgaggttacgctgcgctactttttgcgggtcgagccatacgcgcatcgcgtagtcaccagatccaaataaaccgacttcacctacaccttgtaaacgtgccaaacggtcttttacgttgagcaccgcatagttacgtaagtaggtcatgtcatagcgattatctggtgaggtcagatgcactaccatagttaaagtaggtgagctttttagtgtggttacacctaagcgctgtacatcttcaggtaaacggggcatggcctgagacacacggttttgaaccaattgttgggctttgtctgggtcgataccgagtttaaagttcaccgtaatggttaaattaccgtcgctgtttgcttgagattgcatatacagcatgtcttcgacgccgttgattgactcttcgagcggagaagcaaccgtttcagcaatcacttttgggtttgcacccggatattgggcacgtaccaccacagatggtggaacaacctcgggatattcagaaatcggtaactgaaataccgaaaggagaccggcgagtaaaatcaagactgatagcacaccagcaaagatcggccgatcaataaaaaatttagaaatattcatatgtgattaaccttttgccggagttgatgttttatctgttggctgaggttgaggaggagtagcgctagcagtgatttgtgaatttggcataggaacgagatgcggtgtaacagggtcacccggacgaatccgttgtaaaccattcactacaatacgatcacccgcttgtaatccactatttacgatttgcaagccatcttgttgggcaccgagttttacttcgcggtaagcagtttgatttttcgcatccactactacgacaaaacgtttatcttggtcgacaccaaccgcggttggactaatcagaatcgctgggcgaggttggcctccacctaaacgaattcgtgcatataggcctggtaataaaacaccgtttggattatcaaaagttgcgcgaacacggatcgtacctgaggttgtattcaggttgttatcgattgagttgatcgtaccttcgcgagtaaagcctgtttcattggcaagtcccatatagacaggtacttgtgctgaattacgctgattactgatatatttcaggtaagtttgttcatcaacatcgaaagatgcgtataggcgtgatacagacactaaacttgttaaaacctgtgcgccattacctgcagagacgacattacccacggtcacttcagctcgtgaaattcggccactgactggtgcagtaatacgggtgtattccagatttaaacgtgcagattggacagcagctctagcggcttgtaggttagcattggctgaacgtgcatcattttcggctaaatccagttcttggcgagaaacagcattactctgaatgagacgttgaatacgcgaaagattgctggcggtatatgttacctgtgcttcagctgaagcaagctgggcttttgcacggttcagttctgcttcaaaaggacgagggtcgattgtgaaaagtaaatcaccttttttaacgaggcttccatctttgaaatgtacggcaatgagttttcctgaaacttgaggccgaatatcaacttgatcaattgcttctaaacgaccggaatattcttgccaatcggtaatggttttgcttactactggggctacatcaacagtagcagcttgttgggcagcggttggtgcagcttttgcatcggcattttcatgtaacaacataaaactgccaccggttgctaaaatagcgacaaagatggcagacagtgcaaactgtttgcgggaaaatgacatgaggtgctcctagttatttggatacctgttttcagacttttagttatggtccgtatgggagaaacagggtttatggaatggacggagcataaaagtttgtcaatcacgaataaatatattaaatttgataacactattcgtatttttataacaattgatgtgtttgcactagaaaatgcattaataggagtgtgtgtgtggatctatttcatgccatgagagtattcaacaaagttgttgaaacaaatagtttcagtttagcagctgatagtttgggtctaccgcgtgcttctgtgaccacaaccattcaggctttagagaagcatttgcaagttcgattgcttaatcggacaacacgaaaaattagtctcacaccggatggcgccgtatattatgatcggacagcccgtattttagcggatgttgccgatattgaatcttcttttcatgatgcagagcgggggccaagaggtcagcttcgtattgatgtgcctgtatcgattggacgtttaattttaattccaaggctccgcgattttcatgcacgctatcctgatattgatttagtaattggtctgaacgaccgacctgtagatttggttggagaagctgttgattgtgcaattcgggtgggtgaattaaaagattcaagcttaattgcgcgtcgtatcggaactttccagtgtgcaaccgctgcttcaccgatttatttagaaaaatatggcgaacctacctcaattgaagatttgcaaaaaaatcataaagcgattcatttcttttcaagccgtaccggacgcaacttcgattgggactttgtggttgatgatttaattaaaagtgtgtcagtacgtggacgtgtttcggtaaatgacggtgatgcttatatcgacttggctttgcaaggttttggtataattcaaggcccacgttatatgctcaccaaccatttagaatcaggtttgttaaaagaggtattgcctcagtggacgccagcaccgatgccgatttcagcagtttatcttcaaaatcgtcatttatcgcttaaagtaaaagtgtttgttgattgggtcgctgaactttttgcaggctgtccattacttggcggtacagctttacctttcgaccagaaatgtgaatttgcctgtgataaagaaactggtcatgaatatacaattcgtactttggtcgagcagcataatattgctgaagcttatacgctcaaaacttaatcttaaaatttgattgatttttcaacatttaatccgtcaatacagatcattgcttagacatcttcataaatccttaacttatggtatagaaattgctgttatttcagcagatgagtaagttcgaaatactcaagtttttatcaccttatttgtgttttaaggagaagcttcaagatggcaagctttatgaaaaaaatattcgtttcaacaaccttagttctggctgctgttgcgacgaatgtccaagcaaaggattggaaggtgattcgttttggtactgagtcgtcttatgcgccgtttgaatataaaacaccggatggcaagttaactggttttgatgttgatttaggtaatgctatttgtgcaaaactcaaagctaaatgtgtttgggttgaaaactcttttgacgggatgattcccgcgcttaaagcgaaaaaatttgatggcattctttcatcaatgactgttactgatgaacgtgcaaaacaaattttatttagtagcaaaatctacaacacaccaacgcgtatggttgcaaaaaaaggttcaccgttattaccaacacctacttcattaaaaggtaagcgtgtcggtgtacagcagggcacaattcaagaaacttacgctaaaacctattgggctccaaaaggtgtaagtgttgtcccttatccaactcaagatttgatttaccaagacatgatgtctggtcgtttggatgcaactttacaagatgcaatcatggttgatggtgctttcttaaaacaaccgaaaggcaaaaacttctcttttgccggcggcaatgtggttgatgtcaaaacattgggtgtaggtgcggctataggtttgcgtaaagaagatgcagacttgaaagcgaatatcgacaaggcactcgctgcaatcattgcggatggcacatacaagaaactcgagaaaaaatacttctcttttagcatttactaatgatgtgaaaaatgtcggctgagtgccgacattttaaaatctattctcatctcatcaatattagatattgtttttaaggagaagatgagtcatgtctttttctggctatgggccactccttctcagcggaacatggatgaccatacagcttgcgctgttatcactcttgctttctgtcattattggcttaattggtgcgagttcaaaactctctaatattaaagctttacgttatattgcaaccgcctataccacgcttatccgtagtgtgcctgacttggtgattatgctgttgttattttatagcttgcagttgggtctaaaccaaattactgaagcactgcaaatggatcaaattgatatcaacccatttgtggctggtgtgattactttagcgttcatttatggtgcatattttaccgagacctttcgtggtgcatttcagtcggttccaaggggacaaattgaagcagcaatggcctatgggatgacgccgtggcaggtttttcaccgtgtattattccctcaaatgatgcgttttgcattgcccggcattggtaacaactggcaagttttgattaaggcgaccgcactggtttccattattggcctgactgatatcgtaaaaattacgcaagatgcaggtagaagtaccatgcaactgttcttttttagcatcgtcgctgctgccatttatttggcaattaccacagtgtcgaacctgatcttaatatggcttgaacgtcattattctgctggtgtgaggaagggacaattatgattgaaatccttcgacaatattggcagtcatacctttggaccgatggcctacaaatgaccggtgtggcgatgactgcttggttattggtgctttctattgggattggatttgtgcttgctgtgcctttgtcacttgcgcgagtatcagaaaatatctggttgcgtggtccagtttggttgtttacttatgtttttcgtggcacaccactgtacatccaactactgattatttactcgggtatttatagctttgattatatccacgagcatcagacactcgatgcattctttcgagagggcataaattgcaccattttggcattcgcgctcaatactggtgcatataccactgaaatcttcactggagcaattcgttctattccacatggtgagattgaagctgcccaagcttttggtatgtcaaaatggaaactctacacacgtattatcattccgtcgatgttacgccgtgctttaccgttttacggaaatgaagtcattttaatgttgcatgccacaaccattgcatttacagcaacagttcccgacattttaaaaattgcgcgtgatgtgaatgcggcaacctatgacactttcagtgcttttggaattgctgcggtgttgtatgcggtgttggcttttattttgatttggatatttcgtaagttggaaaaacgttggttggcatttttaaagccatcgaatcattaggagacataaatggaacaggttgcaaaactagtgattcgcgatttacataagacattcggcgatcatgaggtacttaaaggaatatcacttgatgcaaatgccggtgatgtaattagtattattggttcatctggttcaggtaaaagtaccttgctgcgttgtatcaactttttagaacaaccgagcaatggtacgattaagctcaatggtgaaaaattacgcacggtctttgataaaaaaggcaatttaaaagtggttgaaccaaagcaactacaaaaaatgcgtacccagctgatgatggtatttcagcactttaatttatggtctcacatgacagtactggaaaatgtcattgaagggccaatccatgtacttggagtaaagtgttctgaagcggaagaacgtgcgcgcaaatatttacgtaaagtgggattacctgaaagcgttgaaagtaaatatccggcatttttatctggtggtcagcaacaacgtgtagcgattgctcgtgctttggctatggaaccggaagtgatgttgtttgatgaaccaaccagtgcgcttgacccagagttggtaggtgaagtactaaaagtaatgcagggcttggctgaagaaggacgtaccatgattgtggtgacacatgaaatgggtttcgcgcgtcatgtatctaatcaggtgatttttttgcatcaagggaaaattgaggaacagggccatcctgatgaagtactcaataacccgaaaagtgaacgtttaaagcaatttttgacgggcagtttaaaataagctgctgataccgagtatgatgaaattttttaaaaggcttctcagcatactcggttgctttttattatattttatagatgggtgtttttagaaaacacattaataatcacaatacctgcgatcattaaagccaaaccaatacaggcagccaagtctaaatgctgtttgtaaaatatccagccaattgcagaaattaaaataatacctgcgcctgaccaaatggcataggcaatcccgatcggaattgttttgagcgtaagagataataaataaaaagcaactgcataacccacaaccgtaataatagacggaattggaacagtaaaaccttgagatgcttttaatgctgaagttgcaataacttcacaagcaatcgcaattgctaaataaagataagacatgggaagctgcgccagaaagggttttaatcaatctacatgagatgttgatatagtttgaccagttttaacgattgttcaatttttttggtacaaaagtaccagtaaatggaactaaactgataaattgattttatcactagcaatatgctctagaccatttcttcatttatttaatagctggtcagcatagtcataaaaagaggatcagcgattttaacttgaacctctaaatggttttaaaaagagaatgagccgattaaattcaggtctttaaatttctctaataattgttctttgttttcaatatgcacagggtcttgttttatgcaatcgatggggcaaacaaccttacatgttggcgcatcgtaaaaacctacacattctgtacaacgaagtggatcgatttcataaactttgttgccttcaaaaatagccgtattggggcattctggtaagcacatatcacaattgatgcagtcatttgtaattaaaagtgccatatttaactcgctgaataagccaatgtagatgcagtaatactttcttttgcatgcggcaaattgcgtatgagtagggcataactgatatcaacatcttgtgagagcggaatttcaacaaaatgccccgaacctttagcatctgtaattgggttgccttttaaatcgcgcatttcggttaagttaaaggtgatattgccttgaggcgtcatcagctcaagtgagtcgcccaccacaaaacggtttttaacttcaatccgaatataattgccgtgacgttctacaacctctccacaaaattgttggtagtcgaaatgtgatgatccgtcagcatagttttgatattcgctatgcacatgccgtcttaaaaagccttcggtataaccgcgatttgccaacccttcgagttgagtcattaatcttgggtcaaaaggtttacctgctaaagcatcatcaatggcttttcgataaatttgagcagtacgggcacagtaaaaataggatttagtacggccttctattttgagtgaggcgatgcccatttttgttaaacgatctacatgttgtaccgcacgtaaatctttggagttcataaaataggtgccgtgttcatcttcttcggcagcaaacatttcttcatcattacgttgtacgagtaaagtttgaaccgaggttgtttctgattgtcctgatgagcagcaagacttttctggtgtatttagctgagtgactggaattacatcgccgtttaaatcttcttgggcttcatgcagtttatagtcccaacggcaagcattggtacaagcaccttggttggcatcacgcttgttcatatatccagaaagtaaacagcggcctgagtaggccatgcatagtgcaccatgtacaaaaacttcgagttcaatatctggcacatgttgctggatttcttctatttcttctaaagataattcacgagataaaatcacacggcttaggccgtagtctttccaaaatttaacagtggcccagttaatagcgttggcttgaaccgatagatgaatttgtatttctggaaaatgctcacgtaccatcataattaagccgggatcagacataatgagtgcatctggctgcatagccacaatcggttcaagatcacgaataaagttttttaatttgctgttatgtggctggatattcaccacaacataaaactttttacccaaagcgtgggcttcatcaattccgatttttaaattttcatggtcaaaagcattatttcgtacacgtaagctataacgtggttgtcctgcatatacggcatctgcaccataggcaaatgcatagcgcatgtttttaagtgaacctgcgggagagagaagttcggttttcataaaataaaaggcataaaaaatatatggttttattttattaactctatattttcgattcaacctactgaattagtaaggatttgatctatagctttttgtacaggtagcatattttttgctaactctcctaaacgcatcaaagcatttaacattttaggatttaactcaaaacaagctgcaatacgtaaacaatgactaaaacgtttatcagccgagcacaaaattcccggcatacataagattttttcatccatggcctgatgaaacagttctagggtatcaattgattcgggtagctctaaccataaaataaatcccgcttgtggacgactgactcgagtaccgactggaaaataacgacaaatataagatttgatggtgtcaatttgttgttgatagcgttttttgagctgacgtaaatgtagatcatatccgccattttctaaaaaaagtcccaacgtttctgtgagtaaagctggctcggcaacagtggttgtaaatttaagctgctgcacaatattgcggaagcgtccagcttctagccaaccaattcgatagtcgggtgccacagttttggtgtagctgccacagaccaaaacccatccattttggtcaaatgccttaatgttgggcaaaagaggctcggtgagttgtaattcggcatacatcgcatcttcaataacaggaatttggaattgattagcgagctctgctaaacgacgtcggttgttttcaggcatgctaaaaccaagaggattatgtcctgttggaatagttaatatggcttgtacgctttgagattttaagagttcttcaagtgcgtctagacacatccctgtatgcggcgaagtaggcacttctacaatttttcgtcctaaattctgaagaagtggatataagttatgaaaagtagggatctcaagcgctatgctgtcacctgcttgggtggttgccataatcgcgagacttaaagcctccatagtgccatgagtcagcacaatgtcatctgcggatagaaacataccaagctgtaaactacgtctagcaatttgagtacgtaaacgtatagagccgccgggcggtaaagtatagcttttaaaaatatccggctgtgttcgtaaaacctgagcagttaaacgttttaagcgttcaatcgggtagaagttttcaccagatgggcaagctagggccaaattgatatagtcggggtccatctgctttttaacaatttgcgcgagaaaacagctaattcctgaaaggggcactttttcttcactgatataacgctcctcaagatctggcaagtttgaaggtgcatgacaaacatagtagccagactgtgggcgaactgaaattaaaccttggtcttcaagcttccgataagcttcttttacggtattaatactaacttgataatgttgggcacagtctcgaattgatggcaaccgagaacccacaggttgcctgccattctgaatttgaagagtaaggtcatcactcacttttttatatttgtacatatcaatttattaaaaagcaaaaacaatggatacactttatagtgatctcatatttatctcaaacattgtgattaatttagattaatgcttttagcggagatttagttttaaaaactgtgtctattatttttcatattaactgatactgtgaccattaaaaataaaacagtaagatcaaaaaatggtgaggatttaaagcaatattttaaattacaaaatcagtaggagaggtctatgtctgttgttgcatttaaacaagttgatgtttttacttcacaagcatttaaaggtaatcctgttgcggtgattatggacgccagtaccttaacatctgaacagatgcaggaaattgcgaattggaccaatctttctgaaacgacatttgtgctccctgcgaccgattctcatgctgattatcaggttcgaatttttactccgcaaagtgagttgccatttgcaggccatcctacaattggtactgcctatgctttgcttgaggcgggcctcgtgacagctaaaggcggtaaactggtacagcaatgtggtgcgggtttggtgactctgactgtaagtgactcaaagcatatttcatttgaattacctcagcctaaaattacaccactcgatgcaatacacactgaaaaattggtagagattttaaaatgcgaaattaatactcaatggaatgctacattggtggatgtaggcgcgcgttgggttgtattgcaagcggtcaatgcagaagctgttttagcgactcaaccagactttgcagccttgaaacaacatgatttagaaatgaaagttacgggcgcgactgtttttggtttttatgaaaataatgatgagcaaaaacatatagaagttcgttcatttgccccttcatgcggaataaatgaagatccagtttgtggtagcgggaatggtagtgtggcgtcttttattcgttaccatgggattttgccggcacaaaatgatgtcgtgttttcttcacaaggtcaggctttaggccgtgatggacagctgaaacttgaattgtatcaagataaaattttggtgggtggaaccgctgttacctgtatcgatggcagtatcaccttataaaagaggtattaaaaaaccgaggacttagcctcggttttttaattagaaaaaatcttatttttctacgaacgcacgttcaatgacatagtcgcccatttcacccatacgaggtgattcaactaaaccgtgttggtcaagtaacgcagcaacatctttcaagaatgcagggctaccacaaagcattgcgcggtcagtttcacggttgaaacgtggtaaaccaattttttcaaataaagcaccagtttcaattgcagttgttacacggccttgagtatggaaaggttcacgagtaacggtagggtagtaaacaagtttgtctttaatacctaattcttcaaagaactcattgtttggtaattcgttcaagattaggtcttgataagctaattcagaaatataacgcgtaccgtgaactacgattactttttcaaagcgttcgtaagtttctgggtcacgaataattgacaagaatggagcaagaccagtaccagaagataatagatacaagtttttaccaggtaaaaggtcatcatgaaccaatgtacctgttggttttttagaaactaaaatttcgtcgccaacttgtactttttgcaaaatcgaagttaaaggaccgtcttgtactttaatcgagaagaattctaactcttcttcgtagttcgcacttgcaatcgaatatgcacgcattaacggtttgccattcacttcaagtccgatcatcacgaactgaccatttttaaaacgtaagctagcgtcgcgtgtagttttaaaactgaaaagggtgtcattccagtggtgcacatgagtaatgcgttcaacgttaaaagcagccattaaaggtctcgatcacgattaaaagaaaacaggttgctattctaatctaatttcattcccgataaactgaatatatttaattgtgtttataagaaaaagtgatgatgaattctgtcaccctcccaatagtcgggcacatgtgctcaccttttcgagaaaaatttggtattccacgtcagcctaatttggtcaatatcgagtcttatatcgaaatggtagaaccttataatgacttattagcttttgagggaatcgaacaatttagtcatctttggctcatctggcagtttcatgacaataaaaatcaggagactgcgactaaattccggcctcaagttcgcccaccacgtctagggggcaatgaaaaaattggtgtgtttgcgacacgtagtatgtatcgtccagcgcctataggcttatctgtagtacgtttaaacaaggttgaaaaagtcggtaaatcattaagagtttatgttactggcagtgatttattaaatggcacgccaattttagatattaagccttatattcactattcagatgcaattgttgatgctcaaagtggttatgcgcaggccgaaccagaacgaaaatcggtcttgtggtctgaaaatgcattgtctacccagcagtctctttttaaaaataaagaaattaatgcacaatatcttgatgaattagaaaaagtattgtcattagatcctagacctgcctatcaagaagaccctgaacgagtctataaaatgaaattttcgaattttgatattcattttaaagttaatggcaatgtcattacagttgttgatatggtgaaagacacatctctcgtgtaataaagctatttagaaccaatgtatgttcatccatagcaagctaataaatattgtcatatgcaaaatttgggcaggtatgaaagcaagggcataatgcagtccaccagaaatggcagagttaatgctcttggcaattgcatgaacagcaaagccacccatgaacgcgattaataacgaagtctgagagttatttggttcaccttgtacaatcactgctgcaatagcggcatgtatttcgaataaagaagcaagtagtgtccccgcgattaagcctgcattgcctaaatatagacttaggccataaacccctgcctgaatgagcgtaagtgtcccagcaataataatcgcttcttttaagctgaacattctggtatcgagttcagatgaagtcgtacttagttctgccttacgtaataagatgaaagcccataccgctaaaaaagccaatgcaatgagtgttggaaatataatgagtttgaaccatgccaaacttataccgacgacaataattaaggtttgtaccaatgtggaaacgcatgacattaatgctgcacctgcatttgtttttgcattcgcgcgaccagagcgtacttctaagcctagactcgcgatggtggcagtacttgaaacaaaacccgaggctaaagaagaaagtaataaggcatttttagaggataaaagccgctttgcaatatgtgcgagggcttgtacaaataaaatcaacgtcagtaactttaaaatcacatgagggtttagaacgggtccccaaaaaggtttattgggaactaagggtaaagcaattagaagtagagcaagtaaaaaaatcccgtcgcgcaattccgattcggtaatccattgactggcaatgccgtgcattgattgttttgctaataaaataatcgtcatgatgacggcgagtcccgcagctaacgaaatattccagatacaaagtgccccaataaagtaagtcataataaaggcaagttctgtggtgacaccggggtcatttggctgatttttaagagatacaatactgatcgcgcctataagtagagcgcctacaatcccgattgcggtaccaaataaaaaacaaactgctccgagtaaggaactaattgcaaaagagcgaaaacccgcgaaagttttatattcgtgttttaacttacttcgttcgcgctccagacctaccaataagccgcagcctaatgcagccgcaatagtggtaataaactcttcaaaagatacggtttgtaatgacattgtcattggaagattcataatacttcctctttggtttattgttatatgtagatgtcagccatttaaaaatcatgtattccatttcagtttatgctttttcttgtattgagcctagtctcttttttaatcaaactatcacaataagcatctttataaatatgatctatgacacaaaaaaatactaagttgagaattggattaattatttgaagttcaaagatatttaaaagctaaacttgggttttttatacaggctaaacctaaaacttctctgatatattataaaaatatattggggaaaacacatgaatatacatgtagaaatagacacacattggtgtctagaacaactattacaagaaggccgtatcactgaacgagataagttacttgtacaaaccacaaataggcaaaaagatcagttgaaatggcatccattacagtggattgcgcattttaatttaaaagaccaacatcatgtgcaagcacatttaagtttaaaccgtctgtgccaatggtttgcagatcgggcgcaattacctttatttgtgattgatcctttaaaggcggatgtgagtgctttaactcaagtcatgtcgcaagagtttgcgatccgtaatcatattttagctgtagaagtccacacggaccgaattgtgataggaacagaccagccttttcaaacagactggctaaataatttagagaagagtttagcacccaaaaaaattgaacgtgtatttctcaaccccgagcaattacaacgttatttacgagaatattatcaagtcagccgagcagtaaactcagctcaaaaagatgcggctcatgaccgtgataacaacggtgtagaggcacttttacaacttggtgatagccaaaaccctgatgccaatgatcagcatattgtgaaattggtagactggattttgcaatttgcatttgaacagagcgccagtgacattcacatggaaccgcgtaaagacaatggcaaagttcggttccgtatcgatggtgttttacataccatttataacatgccttcaaataccctgaccgccgtgatttctcggattaaaattttagggcggctaaatgtagcagaaaagcgtaaaccgcaagatggtcgattaaaaacacgtacgccgaaaggacaagaaaccgaactacgtctatctaccttaccaacagcgtttggtgaaaaactggttatgcgtatttttgatccagatgtgttagtacgttcctttcagcaattgggttttgaccagtctttattacaacaatggcagcgtattacgcaaaatagtcacggcattattttagttacggggccaacaggttctggtaaaaccacaacgctatattcttctttaaagcagcttgcaaccgagcaggttaatgtctgtaccattgaagacccgattgaaatgctagagcctagttttaaccaaatgcaggtcaatcatgcaattgaactgggctttgcagatggtgtgcgtgcgcttatgcgacaagacccagacattattatgattggggaaattcgtgaccaagatactgcgaatatggccattcaggctgcactcacaggccacttggtattatcaactttacataccaatgatgcgccgtctagtttgacccgtttacatgatttaggtgtacaaccatttttgactgctgcaacaattttgggtgttctcgcgcagcgcttagtgcgtaagctttgcccaaactgcaaacaacaaactcatattaatgaagatgaatggcagcacctaacatttgactacattatggaaatgccagaaaaagtttatcgggcagtaggttgtgaagagtgccggcatacgggttataaaggtcgaatcggcatttatgagtttatgccagttagtcttgagcttaagcatcttattagcagtcatgcgacattaaatgaattaagaagccaaactaaaaaagaaagtgtagagcctttaagaattgcaggagctcgcaaagttcttgaaggtttgaccaccttggaagaggtattgcgggttgttccattaaattaaatttttcttaagattcacctcatctatcgatggtgtaattgttttattccaagggtaaaccaaataacagagggtaattttatgaaaatgcttaaagtaattttgatgactgcgggtatggcaactgcgggtgtggttgtagcaaatacacctgtgaatcaggcagctattgctccagcgacagttactacagtgaaacaagctttagcatcaaaagataatacacctgtaaaattacatggtcaggtcgtaaaatctttaggtgatgaaaaatatcaattccgcgataagagcggtagcattacaattgatgtagatgatgagctttggcaaggacgtcctgtttcagccaatacaaatgtgactttaattggtgaagtagacatagattataagcctttaaaacgtgtagaaattgatgtggaccaggtccagttctaataaattaatttctatattaattccttttagccgcatttaaatcatgcggctttgctttttttataaagacttggcaacatccaatcaggatataacaggaaaaacagatgagaattttgcttgcagaagatgatcgctctcaagctgaaagtattcaatcatggttagaattagacggttatcaagtagactgggtcgaaagaggtgattatgcccttacagcaattgagcagcatgattatgactgcattttgcttgataggggcttgccccaactggctggtgaaaaagttttaacaaccatccgccacaaacaaaaaaacgttcccgtgatttttattactgcacgtgacagtattcatgaccgcgtagaagggcttgatttaggtgcaaatgattatttggttaaaccatttagcctagaagaattatcggctcgcatccgtgctcaattacgtaaacaaactctgaatcagcaatcgattttaacttggggtgatttgcaacttgatacacaagcgaaagttgtattatgtgctggtaaaactatcgatttaacagcaaaagaatttcaaatattacgtaaacttatggttcatcctgagcatattattacccgtgatcaattagaagaagcactttatgcatggggcgaggaaatcgagagtaacgcaatcgaagtttttatttaccaacttcgaaagaaaatcggaagcagcagtattaaaaccatacgggggctaggctaccgtatgggagacttaaaatgagatcaaatcgttcatccttgcagtcacaactggttaaaaccaccatgtggagcagtattgtggtggggctactggcattaagtttactcactatattttcgatttatcacaacatgtcagtacaagatgaaatcatggatgaaatttcagataccttactggtttctgacctttctaaacactcgatgaagcagtttgatgagctgagtgatgagtttgatattcaatatgagttattagatacaggtcaggtgcttacccattctcatacctatcagcatgaactttttgaaaaaggtaatttatcagaaggtttttcatatttttggtttgatggccaattatggcgtagtctggctgcacaacaagaagattctcaactacaagttgaagtttttcagcctatcagtacacgcattgaagaggtattgaaagcactagctggatatagcggccttatggtgctgttctggttactacagtgggttattgtaagttggcgtaccgagcaacaattggctgcgctgaatttactctctaaacgtattgctcaaaaaactgcctcaaacttagagccaattcaagaaccagatgttattacagaaattcagcctgtgattgatgctttaaatcagctacttgcaaggctacaaagggcactggttgctgaacagcgttttactgcagatgcttcacatgaactacgttcacctttatcagccatacaaatgcgtcttcaggtgttgcaacggaaatatcagcatattccagagcttgatcatgattttgagcgtattcaagaagacgtttcaagaagtacaaaaatactggaaaatttattgttactcgctcgcttggaacctaatgaaacagagcaattagaactctctaagagtgtcgttgatttaaatcatgtattagctagagtgatagatacagtaaatattgatgcacaagccaaacacatggtaattgggacaaacattctgtcaaatgaaaccaaaacatttgcaaatgaagagctcatgtttattgcttttagaaatctatttgataacgctattcgttatagtccggctttgggtgctattcatgttgagctaagccagtaccagcaaaagctgaagatttctatagaagatactgggaatggtgtggatgatgaggtcttaaggcgtttaggacagcgtttttttcgtgtattagggacaaagcaacaaggctcagggttagggttatcaattactaaaaaaattattcaactccatggtggggaattacattttatgcatgcaagccaaggtggcttaaaagttgaagtaatactgccttttaaccgtgaaatacaaaaatagcatggttacccatgctatccattttttgttttcccacgaatattattgaaacgcgaggatcgttcttatttagttaaaatgagacggttattgcgagtaaggcgtaaacgatattcctcgccagcatgcataattcgaatttcacgacctaaggcgaataggttgttagaatgcagcattggtaaggcatgagctgaatctgtattgcgtgtaaataagctaaaaggtgcgttcatttgttgtgctccgtggtatattcttgaacgatttaaatgataatcattatcgaatagatctgtcaatgagattttaaagattttataaattgataaaatttgcttacacttgtgaaaaattttagtgagtagaaaaatgcccaaaccgattgtcgatgtcgcaatagctatcttaattcatcgtggaaaaatattagtgggatggcgtggtgaacagcagcatcaaggtggaaagcatgagtttcctggtggaaaggtagagcagggtgaaacgcctgaagaagcctgccgccgtgaaatttatgaagaagtcggtattggtttaaaagattggcatcaatttgattatattcaccatgaatatgatgacattattgtcaaccttcatttgttccatagttatgtacctgatgagttattaaatcttatccatcagccttggacatggtacacacgtgaacagctacttcacctaaacttcccgaaagctaataaagacattattaaaagattatattggcctcattttattaaaattagccatacacttacatctgtagagaatagtgatgctttattatattggcgtatagaagatgaatttggcccgcgagaagtagaacaattaacggccttagatgaagggcaacgatcaaatttaattataaatgtagatatttggcagcaattgaaccccgagttaaaaaaacagatcaagactgttcatttaaaacaatctcagctcatgagtttacataaaggtgatttagaggtaggagtacgttttattgctgcttgtcacgatgcagtttctttacaacatgctcagcaaattggctgtgatgccgtttttgttagtcctgtaaaagtgacggctactcatccggacgttagtgcattaggatgggatcgttttgctgatttaatcgagaagtgccaaattcccgtatttgctttgggaggcatgagtcctgatgatttagccactgcacaacaacatggtgcatatggcttggcgggtattcgtaatttttaataagaaataaagcattaaaagctagaaagctttcaatgcttgttgtgcttcttgaacagtttttgggttattgcgctgttgtccagcttttaaaatgaccaaccaaagttgttttttcatggcttgactctgcgcaaagcttaaaccacgtcttgcaagagactcagcgttagaatattgctgtttatgatttgcagttaatgccagaaataaataggtctcggctgcctgtggcgctaaacgctgtgcttgaagagcgtagcgctcagcctcggaccattgttggtttttgtaagcctgctcggttttttgcattaaagttttaaaagcgggtaactggcttccatcatcattaaagcgttgcggctttttctgctgaggaacaatcacttgtaaacttttacgttgaatttccggatgatcataaggtgtaatttttacaccagatgaggactcggacttcttcttttcagaaacaggaggtgttttctcttttggagctgaatgatctggtaaagttgtacagccgaccataagtacagcaccaatataaaaaacacctttctttaacatatcctgtttcctgttaacgcttagttgttataactaccacttgaaatgattcgtgtgttattcgacagatcttgttccatctggttttcactttcacgaatataactgtcggtattatcatcctgaggctcaggaattgtgttatcactttgtggcgtatatgttggatcaacttgataatacggtgctccacatggcgtagcacgatgtgggactgtatgcgctagcattggaatatacatggcaccatcacaagcttgtgctgataagtcacccgatgcacggtcaatccattgccactgtacagagtctggttgacgtaagtttactggtgtctggcgtaattgtttcatcacattaatccatactggtaatgcaccagatgaacctgttaaaccagttactttattgtcatctaaacctaaccatactactgcaacatgattacctgaatagccggcaaaccatgagtcacgtgtatcgttagtcgtacctgatttacccgctaattttaaagctggagataagctgttataggctgcacgtcctgtacctgatgacatgacctgttgtaaaccatagttcatgatataaccgacagatggatcaatggtttgttgtacgtttagaccataacgatcaagtaaacgtccatttgcatctacaacagaacgaatcgcacgagtcggatatttgaaaccgcctgtagcaaagttttcataaatacccagtacttccattggtgacatattgactgcaccaaggaaaatagaagggtaggccgggattgtcgattcaacaccaaattttcttaaattgttggtaaatgtagataacccgaactcttgacctaagcgcacagcagaaaggttataagaatttgctaaggcttcacttaaactcacaattccatgaccaccgccgctatagttcttcggtgtccaacttttaccgccgtctactggaacactaattggagcgtcttcaatctggcttgcccagttataacgtccagattcaattgcgctcaaataaatgacaggtttcaataaagaaccgacttggcgttttgcatctaaggcacggttaaagccggtaaagtcttgcgttgacccgacagctgcaattaattcgccattttcaggatgggcaatcagtacagccccttgcaggtttttcaagcgagcagggttgctattagctaagcgctctacagaagctttaaaggcattttgaacttgtgtttgagcaattgggtccaaggtcgtaaaaatacgtaatccttgattggttaaatcactttcctgatattcggtacgtaattgacgacgcacaatatctaaaaagtcagggaattttgctggacctaggcttggtttgcttagaacatttaaaggacgcgcaatttcagtttcatactctgcttgagttaaataccccatgacacgcatgttatttaatactgtatcgcgacgattttttgccccttcggggtttttccaaggattatataaagatggaccttgaaccaaaccgactaaataagcttgttgtgcaacattaagctcacgtagtggtaaaccgaaataaaactgagaggccaatccataaccattgattgaatagttaccgttttgacctaaattcacttcatttaaatatgcttctaaaatttcatctttgctgtaatgcaactcaataagtaaagccattaatgcttcattaactttacgtttaagtgtgcgttcaggggttagatagaagtttttgactaactgttgggtgagggtcgaaccaccttggcgacgtcctccagttacattacttaccaaagcacgtgctgtaccacgaatcgaaataccgtggtgatgataaaagttacggtcttctgtagaaattaaagcttcaataagtggtttaggaacactattaagcttaatcaaaacgcggtcttcattatgttgaggataaatgcccccaattaataaaggttctaaacgggcaactccagttgaggaaggttttgtactgcgaacttctacaacttggtcgtttgcaaaactcagttctaaaacctgttcagactctacgctgtcgccatagtcgaaaccacgtgtatggacatacatgttgctgccttgagcaacataggttccagacttgtcataattacttgaagttttgtaacctagtaattttaattcttgggtgaaatttgcttgagtaattggcgcattattataaatttccaaaggtcgagcaaacaccttggccggaatgtcccagcgttgtccttcaaatttttcacgtataatattatctaaacgaatcagatagatactaagagcaataaaagcaccaatcaccaaaatggaaaaaattagcgcgaagaaaccgataccacgttcaaacttcatataaatgagataaaaccctaaacaatgcgttaatgatgcgatagcttgtcatcaatttgcaatgataaaactgtgaataaatggaaaacttagattgaattttacagtatcttgttgttatgtttttttaaattaatctggttaatgttatgatagcgtagaatcgcagcggagcttactcattcgtgcaaatttcacataagtccttcagaaacgtcgggttaattggtcgaccagataaatcatcagttgtagaaacactatgtttaattcatgaccatttgctaagtttaggcctaaaccccatttttgatcaggaaactgccgaattagtgccctatgatcatgcgcaagtcgttagtcgtcacttattaggtgaagtcgctgatctggtgattgttgtaggcggtgacggttcattgcttcatgcagccagagctttagtgcgctacaatacgcctgtaatcgggattaaccgtggacgtttaggttttttaaccgatattaagccttcggaagctatttttaagcttgatcaggttttacaaggtcatttccagcttgatcgccgtttcttgcttgaaatggaagtacgtaccaatggtgaagtcatttatgacgcaattgctttaaatgatgtcgtactacactctggtaagtcggtacatatgatcgattttgaactcaatatcgatgggcaatatgtttatcgccagcatagtgatggtttaattgtttcgacaccaaccggttcaactgcttatgctttatcaggtggtggtccaattttacatccaagtatggatgctattgcattagttcctatgcatccccatacattatcttcacgtccgatcgtagttggtgggcaaagtgaaattaaaatcgtcattcgcgaaaatcgggtattaccgatggtaagtgcagatggacaacatagtgtctctctcaatgtcggtgatagtttgcacatccgcaaacacccatttaaattaagtttattacacccacctggttatgatttctatatggcttgtcgtaccaaattgggttggaaccaagattttgaatcttttcaaagagatgaatcatgaatattgaacaaatgctatctgttttaaaccctgagattgtagagcgtttaaaaacagcagtagaaattggtaaatggccaaatggtgttgctttaacgaaagaacagcgtgaaacatgtatgcaagctgttattgcttgggagttaaagaacttaccagaagaacagcgtagtggttatattgaccgtggtactaaagaagagggtgaggtttgtgaagatgatcatcacaagcatgagcctgaatttaaaccgattcgttttgtttaaaacttaataagacagaaaaattatttttggttattccatacagccttatatagcatgtttttcataagttatagcatataggcttttattacttttgaaggatcaaaagtaaccagaaatcctctgtatcactgacgatacttcctgtatcgcagtgatacggtcgacatccatgtcgaccttcacgatagcatttgttaactacgaattaagattgcttaaatttcgtgtttcccataatacttttgctttttgcatcgcttcctcgaaattagaaactacgcccatggtatataacgcaatacccatggtttctgttacggccatttccccatattcgtgatgctgttgaccaagccagacagctttaaaggttgctaagtctaactcttcttcaattgggctacgttcaggtgtaagctttggcaactcatgctcatagagttcaccatttttaattccgcaaatcagcgttttcgcgtctgggtttcgttcaaattcgccgccttcgcccttaataactgcgctattttgatagcctaagcgaagtgcactatgctgatgggaagttctgtaagcaggatggaatatggcttgtaaggtggctttagcgttaaaaggattaattaaacgggctaaagtatgaataggtgaacgcaatcccatgacatttcttagagaaatcagttcgcttaaaactggtgaaattacttctaagggtaggtaagcgaaattttgttctgccaattgggtgcgaacttcttgttcagaatgacaaattttataatctaaatattccaaaacttgttcggtataaacccggtttatggtatgcccggaagcgccatgcattacgattttataaccgtgatgagcaagggtaagagccgctaataagaaccaaggataatgtttacgtttaccggcataagaggaccaatctaagtcaacttctaaaggtgcaaaatgaagctggtcttttgtggcttgtacaaaacctgcaagttcatcaatcgattcttctttaacacgtagcagcattaaaaaagcacccaactggacgtcaagaacttcgccttttaaaatcatagtaaaagcctgataggcttcttcataactcagtgagcgagatccagttttccccttacctaaaatacggacatattgagcaaagggatgttcagcatctttataaatattacgtttagtattcatggcaattcaaaacagtaaaaataaggggagtaggcagctcaaaatgaaatgtctacaaggacttatcaatatgacataaaaaactgatgaaaaaatatcaaaagtgtttctcatactaaagtcttaaggctgcatgagtattttttgtgcgtattagccaaaattttaatcgaatcgttatttaattcgagtaaacttcatgtgcttttttgagcactcatatcataattttctgtgattctcctatatcttcagctttttattgaaaaagtaagaggttatttctagctactcaaagtagttagaaacttcaggtattctcctgttttagaaaacagttttttgttttcattgaggtagtaggaaggttttttgtttctaaaaaaccgtttcccttttgcggtgttcatgtgaaaggttagggctgtgtattcgtaaagaatagacgtttcattttgatatttccaacggacttggaaatatagattgaagtaaagttatggctaaaaaaccgatttataaatcactttattttcaagtgattattgcgattattgcgggtgttttggtagggcatttctcaccaagtacaacgcaaattgttaatggtgttgaacaacatattccaggtttaggtgagcaactcaagccattaggtgatgcttttattcgtttgattaaaatgatcatcgcacctgttattttctgtacagtagtaagtggtattgctggtatggaaagcatgaagtcagttggtaaaactggcggtgttgcgttgttatacttcgagatcgtttcaacaatcgcgcttctgattggccttgtggtgattaacattgcaaagccgggcgtaggaatgaatgttgatcctgcaactctggacacttcaggtatccaaaaatacgtcacttctggtgagtcacaatctaccattgatttcttgatgcacatcatcccagatacggtggttggtgcatttgcaaatggtgaaatcttacaggtccttctttttgcaatcctatttggttttgcgctccataagttaggtgatgcaggacgcccagttttaaagttaattgatcaaattgcacacgtgttcttcaacattgtgaatatgattatgaagcttgcgccaattggtgcatttggggcaatggcgtttactatcggtaaatatggtgtaggttcactggtacagttaggccagcttattatctgtttctatattacgtgtttactctttattttcttaattttgggtacaatcagccgcattagtggattcagtattctgaaaatgattcgcctgattcgtgaagaactattaattgtactgggtacatcttcttctgaatcggtcttaccacgcatgctccgtaaacttgaaattgcaggttgtgaaaagtcggttgttggtttagttattccaacaggttattcatttaaccttgatggtacgtcaatctatttgactatggctgcaatctttattgctcaggcaacgaatacacagcttgatattcaacatcaaattactttgttgttggtactcctaatctcatctaaaggtgcagcgggtgtaacaggctctggctttattgttatggcagcaactttatctgcagtaggacatattccggtagctggtttggcattgattttaggtattgaccgcttcatgtcagaagcacgtgctttaaccaatcttgttggtaactctttggcaacgattgtagttgcaaaatgggtgggtgctttagacaaagataagctcaatgatgctttaaacaacccagatgaagttgacagaaaaatgttggctccaaaaaatcctcaggttgcagaaggtttagattaattcagatctacctatataaaaaaggaagctttggcttccttttttattggctgactgaaaagtacagtttaaatgagcagctaagccatgacagttgtgtaaaaaatgattagcatgcacagcaatgagattcgataaaacaataaagccgaaggaaaatattatgttggcatatgatgcagatttagaattattccgtgataattttaaacgttttatgaatgagcatattgctccacattatgaccaatgggaacgtgaaggaattatgccacgttcagtttggtctcaactgggcgaaaatggttttttatgtgtggatgtcccagaagaatatggtggttatggcgtcccaacgtattattcattaatgttagttgaagaatcggctcgtgctggattttgcgcattatcaactgctatttcttgtcactctgagattgcggcgccttatattttacatattgggaccgaagaacaaaaacaatactggttaccgaaaatggtaacaggtgaagtagtcggagcaattggtatgacagaaccgggtgccggttcagacttacagtcaatgcgtaccagtgccattttgcaagatgaccattatttgctaaatggttctaaaacgtttatttcaaatggacaacatgctgatcttgtagtgcttgcagtaaaaaccgatccgcaagcgcgtgcgaaaggtgtatcgttattattggtggatactcacctagaaggtttcaaaaaaggaactaacctcgacaaaatcggattgcattctcaagacacatctgagctattttttgacaatgttaaggttcctaaaaatcagttactcggacaagctggacaaggttttgcttatttaatgcaagaattaccgcgcgaacgtacggctatcgcatcgacagcggtcggcgctattcgtggtgcaattgatttggcaaccgcttatgtaaaagaacgtcatgcatttggtcaacctatttcacagttccaaaatactcgttttgttttagcgcaagcaaaaattgatgagcttgcgacaacagctttctatgagcgaaatgttgctttatatcaagaaggtaaacttgatgttgagacggctgccgcactgaaaagttttagtacagatatgcaaatgaaggttgcggataacctattacaactgtttggtggttatggttatatgactgaatatccaatttcacgcttctttgtagatgcccgtatccaacgtatttacggcggtacaaatgaaattatgaaagaaatcgtagcacgtggattaatcggcaaagcttaataatagtttcaaaaaaagcctacctttgagtaggctttttttattatttagctgttttctgcgatggttcatcgaataaagatttacagctttctagattttggcatgaagcaaacataagcgctttaggtaagctcgcatacaaattggtgatatgctgttcagcaggattattgaaatgccaataagtaaattggtctgaacgcttattttctaagactttaaagaaatcgtctttattaattctttgattaaactgggtatgtggcccaccttgttcatgtgtaccgactgtcgtcattagcattgggaacacggtttgcttttgactttgccattgttctaattctcgaaataacatgccttgatcaaaccagagagaaggacttgcagcaaagtaacgctggaatgcagtaggtttttgaaaaaaatgataaagcacaaacaaccctccaaaagaatgcccatagagactttgctgttggctattaattggaaattgtttagcgatttcaggcttaagctcattatttaaaaaagcaataaactggtcagcaccaccatatttatatttaccttgtgcttgaaactcggcagaaggttttggggtgtaatcataagcgcgtttttgcacatcaaaggttttttgctgaggatagcccacagctacaataatgagcggatctaaacctaattttgcagaacctgctccaatcgactgggcaatatttattgcgcttggaaatgttgcattaccatctaatatataaagtacaggataaccatgttggggtggggcaacaggtggtttataaatttgaataaggtattcatgtccagtatttttagatttgatttggaactgagcctgattgttgtgaaaatcgatttttgattgattttttacaggggcttgagccaaaacggaactacttattaaaaaacctagaaagaaattacaagataaaaagaaaaaagatttaagcatgataaagttaagaaaatattataagtcaaataataaatgaaaatcattatcaaataaagtggtcttatacaaaggttcgagccggattaatgaaaaaagcccatacacccatattgcctaacaaatcaaagccgactattgttatactctcgtttaaaagatgattttgctgaggctgccttccaatgatcaacgatgatcaaaacaaaacgacttctcttagtttagaacaaattcgcgaagatattgatagcgtagatcaacagattcaagagttattaaatcgccgcgcaagccttgctgaagctgttgcgaaagctaaatttgcttctgaagagaatcctttgttttatcgtcctgaacgtgaagcacaagttttacgtaaagttatggagcgcaatcaagggcctttatctgacgtaactatggcccgtttgttccgtgaaattatgtctgcttgccttgctttagaagctccgcaaagtattgcatttttaggcccagaaggtacttttactcaatctgccgtacttaaacattttggtaaagatgcggttgttcgtccgctaccaactattgatgaagtattccgtgaagtagaagcgggtagtgcgcattacggtgtagttccggttgaaaactcatctgaaggtatcgtaaaccatactttagattgttttaaaacttcgaatttaaatgtgattggtgaagttgaattgcgtattcatcatcaattccttgtttctgaaaatacacgtaaagatagtattaagcagatttatgcgcatcagcaaactttggctcaatgtcgtcagtggttagacgcacattatccgggtgttgagcgtgttgccttaaactcaaatgcagaagctgcacgccgtattcgcaacgaatggcactcagcagcgattgcgtctgatattgcagcaggcatgtataaccttgaaatcttgcatagcaatattgaagataatccggaaaatactactcgtttcttagtgattggccgtgaaaaaattccacaaagtggcaatgacaaaacatcgttattaatttcagcgcatgaccgtgcaggtgctttattagaaattttagcgccgtttgcaaaacataatatcagcttaacgagcattgaaactcgcccagcactacctgaaaaatgggcatatgtattctttattgacttagaaggtcatatcgatcaggaaaatgtggctgcggcaatcaatgagattcgtccaatggtaaaagaacttcgtattttaggttcttatcctgctgccgttctttaatcactcatgttggaataatgacatgtatcaagatgggcatgtcattatgcttaaaaaacaaattgctcaaaggtttaaataacgttgagcaaaagcaaagttgaagttatgtcacaacccctatttaaaaaagttgcatttattggtttaggactcattgggtcgagtttggcacgggttattgttgccgaaaagttggcgacaactatagtggcatctacacgctcacagaaaactttagaagatgcaaaatcacttggcttaatacaagaagggttttccgatcctgttgaagccgtgaaaggggcagatttagttgttttagccttgccagtgcgtgccactcaaaaagtgcttgagcaaattaaaccttatttgtcagaaaccacaattgtaactgatgtgggaagtacaaaaggtaatgtcgtagatgcagcaaaagctgtatttggtgaagatttaccagcagggtttgttcccgggcatcctattgcgggaagtgaacacacgggtgttcacgcaggtaaggtcgatctctttgcaaatcacaaagtgattttgacgccattaccaacaagtgcagaatgggcagttgagaaattgattcaactttggtcagctgctaaagctgaagtgatatgtatggatgtcgccaaacatgatgaggttttggcgcataccagtcatttaccgcacttaatggcatttaatctggtcgagcaacttgcaaaccgtgaagataaccttgatattttccgttatgcagctggtggtttccgtgacttttcacgaattgctgccagtgatcctcaaatgtggcatgacattttctttgccaataaaacagctatattaaatgctgtagatggcttcgagaaacaacttaccgtacttagaaaattgattgaaaacgaagattctcatgcattaatgggtttactcggccatgctcaggcagcacgtcagcatttcaatcatatgttagccaaaaaacctttaatggagaaaaataaggtgacacagcaattcagtatcttaccgggaaataaggcttttaaaggtaaatttaccgtaccgggtgacaaatctgtgtcacatcgctccattatgtttggtgctattgccgaaggcacgactcatgtaactggcttccttgaaggtgaagatgctttagcaactttacaagctttccgtgatatgggtgtaagcattgaaggccctaaaaatggtgaagtgaccattcatggcgtgggtatgtatggcttaaaagcaccagcaagtgccttatatatgggtaactctggaacaagcatgcgtttgctttcaggtatgctttctgcacaaaagtttgattctgttatgacaggtgatgcttcgctctctaaacgtccaatggagcgtattgctaaaccattacgtttaatgggtgcgcaaatccaaacgacaggtgagaaaggtacaccacctgtaagcattactggtggtcagcaattaaaaggtattcaatatgatttacctatggcatctgctcaagtgaaatctggtattttactagctggtttatgggctgaaggtgaaacttcggtaactgagccggaaccaacacgtgatcatacagagcgtatgcttcgtgcatttggctatgatgttaaaactgaaggcaataaaatttcccttgtcggcggcggtaagttagtgggtactaatattcaagtaccatctgatatttcatctgctgctttcttcatggtgggcgctgcaattactgaaggtgcagacgttgtacttgaagctgtaggtattaatccaacacgtactggcgtaattgaaattttaaaacagatgggtgctgacctgactgttgaaaatgagcggatcgctggtggagagcctattgctgatattcatattaaaggttcacgtacccttaaaggtattcatatgcctgaagaccaagtacctttagcaattgatgaattcccagccttatttattgcagcggcttgtgccgaaggccaaacagtattaacaggtgcagcagagcttcgcgtgaaagaatctgaccgtattcaagttatggcagatggtttaaaaatcatgggcattgattgcacacctactgaagatggcatcattatcgaaggtaaaggcaaatctggtgattggtcaccaatctttgctggtggtgaaattgaatcacaccatgaccaccgtattgcgatgagttttagtatggcaggtcttcgtacttctggtccgattacaattcacggtactgagactgttgctacaagtttcccaacttttactgagttggcgaatcgtgcaggcttaacgatagaagttagccaataactttttacctgacacattttataattgctaacacaatagcaacggcagcagcgagctaaaggcttggctgctgtttgtttattgcttatgctaagtgcagataatgataaaagtgttaggacaaaggatgaaaaaattacaatttattgccagttgcccacaacatggggtgcttgatcatccaccaaatgaatgccatatcactcaagaatatgtagcggctttactgtttaaacaattggggaattatggttttgatgcacagcatattgtgcatgaacatgaaaaggtggaagtaagtattgataatcaccttttaccattgtctattacttgccagcaaacagaccatgatgggcatttaatgtgtgaaatctctgccaatcctgatgaagaacaagactggtttgagaaaatcgaaacacaaagtattattcgtcagcttgcacaggctgttgaaaatagcttgaaagccgatcatagcttttcagcatttgagtggaaaagctaaacatattattgttaagacttatttgtgaagtacggctttttagaaaagtcgtacaatttctttaaattaaatataaaaatacaaaatctttcccgaaatcgctacctatctttaatgctttgtgtatattgaaattattaagatatttacataattagagtgtagttttcatgacacaagttgatattgcagcattatctcctcaagtcgtttggcagcattttcaaacactttgtactattcctcgtccgtcaaagcatgaacagcaacttcgtgagtttttacaaaactgggccgaaagtcggaatttagaaacttatgtagatgaagtaggaaatttgattatccgaaaggatgcaactgccggtaaagaacatgtgtctggagttattcttcagggccatttagatatggttacacaagccaatactggtacggtacatgacttttttaaagacccgattcgtccagttcttgaggatggctggctaattgccaaagacactactttaggtgctgataatggcattggggtggctttggcattagctgttttagattcaaatgatattgctcatggcccaatagaagttcttttaacagtcgatgaagaagcagggatgagtggtgcgcggcttttagagacaggtgtgctaaaaggaaaatggctatttaatattgatacagaagagtggggtgagttgtatttggggtgtgctggtagtattgatgttgaggtagagcagccgcttagttatgagccaatccctgaaaatttgaatattgttaatattcaggtggctggtcttaaaggtggccactctggcgtagatatccatttaggacgtggcaatgccaacgttattttggctcgctttttaaatcaacatttagcctcactgggtgggtatcttgttgagtttataggtggtacagctcgtaatgctttaccgcgagaagcagtggcaactattgcaatttcgcctaatcagttatcaagcttagaaaagttacttgctgaatatcaaacgacatggaaaaaacagctaaagggtattgatgacaacttgcaattaagtattcaatccactggtgttgaagtgaccgaagtgattaatcaacaacagcaaaatgaatggttgcaagctttagcaacaagtccttatggggttgcaagtatgagtcaggttctaccagatgtaattgaaacctcaaataacattggggtggtgagactaaatcgagaaggtggaaaagctgtcttaatggttcgttcaatggtgaaccaagaagctcaagattttgcagaaaaaattcaggcacattttagccagtttaatatcggctctacacttacgccgttagtgtcgggttggacaccaaatccagattcggctgctctaaagtgcttacaacaagcctatcaaaatgcatttaatattgagccaaatctaaaagtaattcatgcaggcttagaatgtgggattattgctgaacattacccacatttacagatggtttcgtttggaccggatattcaaggtgcacatgcaccgggtgaacgagtcaaagttgatactgtagagaaatgctggaagctactggtaaccgctttggcatctgtagagtaattttttaagagataagaagctcaattatgagcttcttaaacttttatatggaaatgatatgtagctaatttttactcgatttttaaaagttgtcctgtttcacttaaagtaaactcatcaaaatcattcgctaaataaaaatgacctttataaaactggcgaacttcttcggtaatagcttgctgcccagttttatcctgatgtctagggctaaagtgtgtcagaattaaattgtctagagattgctgctcagcaaattcagccaccatttttgctgagctgtgcattggtcctttacctactttatctaagactgtttgcaaataagttgcttcatgaataagtaattgagcatccttacaagtatcggctaataattctggccgatcattatcaccacctataattgcatgaatctgctgtttttgaattttgataaagtcttgagattttaaaattcgcccctcaaactcaacatcgtagcctcgttttaaatgcccccaaatatcgcctttaggtacgccaagctgagttaaagcttgaatatctatcttcttctgggtggattttatataaatactaaatgcaaaactcggaacacgatgacttagtggatgtgcttgaataaagagttcatcggtgagctgctgtggccgagttgcttcattaacatcaataaattttattgaataaggcaaatgtaagtctgtaagttgagcagtgatttcaaaccattgttgaatttctttgggcgcaatcacgattaatggttttgtacgggcattcatgcctgcacttgccagtaaaccaactaggccataacaatgatcgccgtgaacgtgtgtaatacaaatggcaattaagttttgtagtgagagtctagcttgctgaatacgatgctgtgtaccctcaccagtatcaactaaaatccagtccttatttttactgttacgaacagctaatcctgaaacattgcgtgaaagcgtgggtacacctgatgatgtgcctaaaaaggtaaaatgaagcatattcttggaattttttagtcaaatgcgtaatttttatattatagacacttattaaaattttataaaaattatagtagatggtagtgaccgagtaaaaaatatttggcgcgttttggcttaagttggaataattttcaatcaggacatggcttgaaaatgatgggcatactctcaagttatgcccatcaaatacactttatttcatgataataaaacgtgtaatgatttggcgaagctgttttaaataacctgtaaagaagtggttagcgcccggcaaaatcgtaattggatgcttttgaggttttgcccactcaattgcatctgaaagtaaggtgatgtcatcttgctcaccatgaatgagtagaatatcaccttgaatttcaggtgttttatagtgacgtaatcccacaacagtagctgttggtaaaccacataaaattaactgtattggctgtaattcagggctaagctgcgcatgacattttgccaaaacatgtgagccaaagctaaagccacctgcataaaatggcaaacctgcatgaagcttacgaacatgctcaatcacagctaaaatatcttcagtttctccatgaccttcatcatgaacaccttcactgccgcctaaaccacggaaactaggacggtaaacaatacagccatattcattaaagatttgggttaaaagagcagggactttatgttgaggggttccaccttgtaatgggtgagggtgacaaacaactgcaaagcctttgatttcaccttcaggacggtcaacgaaaagttcaattttacctactggaccctggatgaaaatttgctcagacatagaagaaccgctaaataacaatacgtaagtgctattttaccgatagtcgtcattgaaaacacgagttagcattaaaaaatatctactgttatagttggcattaataataatttttttcaggttgtctatgcttgctttaatttctcctgcaaaaactttagattatgaaacagcgttacctacagatgagtttactcagccgcgcttgttagaacactccgcacaattaattgatgtttgccgcaaactttctgcttcggaaattgcgagtctaatgagtgtcagtgaaaaaattgccacacttaatgctgatcgttttagagactggaagccagaatttgatttttcaaatgctcgtcaggcaatttatgcatttaaaggggatgtttacaccggtttagatgcttatcatttaaaagacaaagatattgattttgcccagcagcatttacgtatgctctctggtttatatggtttattgcgtcctttagatttaatgatgccttatcgtttagagatgggtactaaattaaaaaatacgcgcggtcacaatttgtatgaattttgggatgatattatcaccaatcggattaatgaagacttggcagcaattaaatctgaattgctggtaaatttggcttcagatgaatattacaaatctgtcaatgaaaagaaaattaaggctgaaattgtgaagcctgttttccttgaccagaaaaatggcaaatataaagtcattagtttctatgcgaaaaaagcacgtggtttaatggctcgttttattattgaaaaccaattaaataaagctgaagacatcaaagcttttaatactgaaggttactactttgatgctgataactcatcggcaaaagagttggtgtttaaacgtgatgagcaataatcctaagcgtggttaataaatgctgatgcagctttacttattaaaactggaacttttttggtttgaactgcatcagcattatcatttttctgaaccgcagaaaattttaaatgaacttattgctgcttatagtgaaaagcagcgagcctaccacaccgtacaacatttatatgaatgtttgagtttaattgagacgattcagtccgaattaaatgatccatatgctgttgcattggctctctggttccatgatgtagtctacgaacctcaagcgctagataatgaacttaaaagtgccgagttatttgagcaattgatggctcaagatttacagctcgatacaatgcagaaaataaagcgttggattcttgcgactcaaaagcatgcaccaaccgatgaaacagatttgcaatttttgttagatatcgatttagctattttggcagcaacacctgaacgttttatccagtatgaacagcaaattcagcaggagtattcttgggttgatccagaagtatattcaattaagcgaaaagaagttttaatgaatttttatcagtctgagccgctttatcaaactgcatatttccaaaagaattttgagttaaacgccaagcaaaatttaaagaaaatattggaatagcctaagctaaatataaaatttaaatctgttgattgaataaagtgatatagatttttaatcttttttgaaaagtgaaaatggttacatgaggggaaagaggaaccactgaaaaaaaaacagtgattccttagaaataaattatttaaagaaataacctgtttctggtgaacttgcatttgccatgcgtttgcgtggcatacgcccagctaaaaatgcttcacgtcctgcttcaacagctttcttcattgcagaagccatcaaaataggattttgagccgctgcaatcgctgtgttcatcaatacgccatcacaaccaagttccatcgcaatagcagcgtcacttgctgtaccaacacctgcatctactaaaaccggtactttggcattttctttaataattgaaatggtatgcgggtttaaaatacctaggcctgaaccaatcaaactacctaaaggcataattgcaacacagcccatactttcaagttcttgagcaatgattgggtcgtcagaggtatagaccataatctcaaaaccatcatcaatcaaagtgcgagcggcttttaaagtctcggttacatttggatataaggttttttcatcacccaacacttcaagttttactaggttgtgaccatccagtagctcgcgcgctagcatacacgtgcgtactgcgctgtcagcgtcaaaacaacctgcagtatttggcaagattgtatatttttctggtggaatgacagaaagtaaattcggttgatctggattttgtccaatattcacacggcggattgcgacagttacgatttctgcaccactagcttgaatggctaaatccgtttcatttaagtctttatatttccctgttcctaccaataaacgagattgaaaagaacgtgaaccaataatgagaggggtgtcttgcatggataactccgacttagccgccgccaacagcgtgaataatttcgatacggtcatgttgagcaatcgtaatttgctctaatttgcttttaggcacgatttgctgattgtgttcaacagcaaaacgttttccttcaagtgccagttcctgaatgagttgcaacaggttttggctaggcgtgtccgttaattcgccatttaaataaatttgcatgatcacattccgattattttgcgtatttgaaagcattccaagccaagattagccatccagcaatcatcaaagctccacctattggcgtaatcgcacctaatatccgcggtaaacccaatgccatgatataaagcgaaccacaaaagaacagaatgccaatctgaataagcaagaaagataacttgattgggaaatgaggaagaaccttgcttaaaataccaagcgctaacaatccaagcgcatgataaaaaaagtagtcggttgcagtctgccaccaagcaagttgttcagggctcgcgtgagctttaagaccatgtgctccaaaagcacccaacatgactgcgaaagcaagattaagggctgaaatggcaatccacataacaaaaaacgcaactgaataatgaaaggcaacgttaccatagaataggttggctaaacatagccagataaaacaaaagggcttatcgcccttttatttttttgattttctttagcttgcagacattgcgactttaattttttccatcgcattcttttcaagctgacgaatacgttcggcagaaacattatattcggcagcaagctcatggagggtagatttatcgtcatctaaccaacggcgctgcaaaatattacgtgaacggtcatctagctggttcattgcgtcatgcaaagcagatgtactttgttcttcccaatcctcattttctactaaacgagcagggtcataacgattatcttcaagatataacactggcgcagtgtgcggggtgtcatcatcgtcatcgccttgagcttcaaaagcagcatcatatgctgttaaacgaccttccatttccaaaacttgttctggagtaacatttaagtcgtttgcaatagattgcgcttcttctaatgtgagctttttactcgatttttttaagctgcgtaaattgaagaaaagtttacgctgagctttggttgttgcaatttttacaatacgccagttacgaataacatattcgtgaatttctgccttaatccagtggacggcaaaagatacaagacgtacgcccatatttgggtcaaaacgttttacggctttcattaagcctaagttaccttcttgaataaggtcaccttgaggtaggccataacctgcatagctgcgcgcaatgtgaacgacgaagcgtaaatgcgacattaccagcatttttgcggcatcaagatcttggtcataataataacgctcagcaagctctttttcttgctcagccgttaaaataggaatctgattgacagtactgatatatgcaccaaggtttacaccgggcgcagacaatgacaggggcatcaattgattgctgctgtcactcatgagttctccttataggataggatggattaaccaataagttcatcttaatttgaatcggcttcataattaaggaaaattgggtatagaaatgtaaaattttatgcagtttctaatcttttagtttagcaaagaattattgagtttcaattaaatagtgaaattctctttctgaaatctgcatggtttgacacgtaaaatgatgtaattggcaataacgtgttacatcaatttcactatgcgggtcagatgattttaataagaatagttgttttcccgataattttttaagttcacgtttcaacattaataatggcattggacaaggttggccaagggcattaatttcaataggcgtcgtagcggaagaagtagtgctcattcatcatcaaaacaactaaaaaaattattttaacaaatttttgtaaacactacataactttatataaagaacaactaatcaatactgataaaaataattgtaataagctgtttaaaaaaacagctaaaaataggggaaataaatgaaaaaaattctattaattgtcataaacccgtgttaagctcgaaccgttttaggaattaccacacagttaaattgttttaataaccctataacaaatggatgtaaccggaaattgttgatagttttacagaatgattacaagctttaagattataaaaattttaaaaccttgtttgctctgctgtttgcaacaccggaaggtccttttttcatcatctgaggattgacttatgacagctcgtgaacaaggcgtagtaaagtggtttaatgacactaaaggctttggttttattcaacgtaacggcggcgacgatgtattcgttcacttccgtgcaatcgtaggtgacggtcaccgttctctacgtgacggtcaacgtgtagaatttagcgttgtacaaggtcaaaaaggttttcaagctgaaaacgttcagcctttagactaattcatctttttgatgaatcatggacgctccaatttttgaattggggcgtttttgtttataatgatcttctcattcgagagattgtttgttagagcgcgtatttatgacatctggttttgaaaccttgaatttacatccgcaacttaaaaaggcgattgatgctttagggtttactcaaatgaccccaattcagcaaaaggttttaaaatatacattagccgggcatgatgcaattgggcgagcacagacaggaacaggtaagactgctgcctttctgattagtgtaattaatgatttgctcaataatccggttcaggagcaacgcttccgtggtgagcctcgtgctttaatcttagcacctactcgtgagttggcattgcagattgaaagtgatgcaaaatctctcacaaaattttctaatttacacctagtgaccctattaggtggcgttgatttcgataagcagaagaagcaacttgatgctaattttgtcgatatcatggttgccacaccagggcgtttaattgattttgtagaacaaaaagaagtttggctcgatcaaattgaatttttagtgattgatgaagctgaccgtttattggatatgggctttattccttccgtaaaacgtattgtgcgttattcaccacgtaaggaacaacgacaaaccttaatgttctctgcaacatttagttatgatgtcttgaacttggcaagacaatggttatttgaaccagtaactgttgaaattgaacctgaacaaaagaccaataatgatgtcgaacaacgtgtttacgttgtggctaaacaggataaatatcgtcttttacaagatattttacgtgaagagccaattgataaagttatgatctttgccaatcgccgtgatcaggtacgtcgtctttacgaccatttgaaaaaagatggatacaaagtggggatgctatctggtgaaattgctcaagataaacgtttaaaaatgttggagcagtttaagcaaggcaagcataacatcatgatcgcaaccgatgttgctggtcgtggtattcatgtagacggtgtatcacatgtagtgaattttacattgcctgagcagtctgatgattatgtccatcgtattggtcgtacaggtcgtgcaggggcacaaggggtaagtattagtttcttatctgaagatgatgctttctatttacccgaaattgaaaaagcaattggtaagaaattgcctctaacccgactagatggttattgctaataaaaaaatcccaatcaaatgagttgggattttttttgattaatttattttacaatagaaggtaagcgttgtttgataatcatcatcttttgctaaagatgcatttttaccagttaaagtaccgatgacacccgcagcagcttctaccatttgaccagtcttttcacttaccacatcttttaaaaccccgtgataagacgttttttcatcaacaataactggtgttgtgctcttagagcatgttttttgtgccgcagtaaccgcattattctttgcaattaaattggttttgccaattccagtcacttcaaactgattattttctttttgaattgctaaagtgtttttaggcgtggttgcacaagcacctagtaataaaacaacaccgctcattgcggtcgctaaaattatttttttcataatgcacctaagttaatcaccaaaagatagggttatttgaacataagttttctaattgattttgaagacgttgtatgagttttgatgttttgtattaaaaaatgtcaaactatgaattcgctaagtttataagctagattcaatggtggattaacggtagattatgctaatctatttcgaatttttgagttagattaatattaatgacggattcagcaatacaaataattcaccaaaatattcatcagcgtcagtctattggtcaattagttgagccagccccaaatacagatcagttagagttggcttttcaggcagctttaacagctccagatcatcatagacttaagccaacgcgttttgtaattgtgtcaggtgaccaacgtgctgcttttggtgaagttctggcaaaagcattggtcgatttgggtgagtctgatcctgcacagcttgaacgagtgaagcaacatccttttcgagctccgctacttattttagctcttacgcaattacaagatcatccgaaagttccacacttcgaacaaattttgagtacaggcgcagcagtacaaaatcttttgttatctttacaagctcaagggttcgcgaccatgtggcgtagtggtgccgttgtcgaatcaaactggttaaaacagcatttaggtctgcaaccgcatgatttgatttcaggtattatttatgtcggcacagcagctaaagcaattgcaccgcgtgcagatattgatagtaaagaattcgtaaaagtttggcaggcttaaacgtctgtaaaagtaagaaataggataataaagcatggctgaatttaagtttacagatttggtggaacctgttgcggtcgataaaaaaacggcattacgtattaccgttttagggggcggtagctttggtacagctatggcaaatttagctgctcgtaatggctgcgataccatgatctggattcgtgatgccgaaacagcagaagaaattaataaaacccatattaataaacgttatttaccagacttcactttagaatcttcattacgtgcagtttctgatcttgagcaagcggtatgtgatcgagatattattttagttgcaattccaagccactcattccgtgatgttttaaaacaaatagcgccttatattactgcacaagctgtggtgtctttaaccaaaggtgttgaagctaaaacatttagcttcatgagcgatattattcgtgaagaattaccagaagtgccgtatggcgtattgtcaggaccaaatctcgctaaagaaattatggcaggtatgccttctggtactgtaattgcaagtgattctgaactcgtccgttatgccgtacaacatgcacttcatagtgcgttattccgcgtttttggtagcgatgatgtgcatggagttgagttaggcggtgcgcttaagaatatttatgccgttgctatgggaattggagcagcatataaaattggtgaaaataccaagagtatgattttaacgcgtgctttggctgaaatgagccgtttcgcggtaaaacaaggtgcaaacccacttacgttcttaggtttatctggagtaggtgatttatttgcgacttgtaatagtccattaagccgtaattatcaaattggttatgcgctaggttctggtaaaacgcttgaacaagcgagtaaagaattgggacaaactgcagaaggtattaacacgattgttcaggtgcgtggcaaggcgcaagaactagacgtatatatgccaattaccaatgctttatatgaggtcatttttgaaggcgctccaccattaaatattgcactttctcttatgaaaaatggacaccgtagtgatgttgagtttgttttacctcatcatgaagtctgacgaataaatgtcataaattgtggttataatgcaggaattgtttacaaggaaattttatgcaactgacattagttcgtcatggggaagctgctccaccagtaaatggtaatgatattaaacgtccccttactgcgcgtggacatgcacaagccgagcaaacggcaacgtttttaaaagatattgtaaaaccagatatttttgttgttagtcctttgctgcgtgctcaggaaacgttggcgcatatccagacctattttaaagatgtgccagtactgttatgcgacaaaattaagcctgacgatgatgcaaaagaagcgattgaatggctatcccaaattccttatgagtcgattgtggttgtttgccatatgaatgtggtagggcatattgcagagttactgactcatgaaaatttcaatccatttgcacttgctgaagcaagaatttatgatcaagctgttattgcaaatggtttatcaacacaaaaaaatagttttatacccacaatataattaaaaaggttatttagcccacatgctgtacatatggatgcctgaaaccaatggagtttggcattggtctaacggagaaaactggttgcaggctgcaagtctcgatcaattaatacaagacttgcaaatacatcaaggaaaagaagctacggtcttttttccgagtcgtcatgctcaaatgcttcagcaaacgatggcaaagtcccattacaaacagcttggcgctgatggggttaaatatctacttgaagagtttgtgactttaccgattgatcacatgaaagtggttcaccattttcatgcggatcagttaactgttttgggtgttgctcagggggtggtagagacatggcaacattctttagctttgttaccaaccaaacttgtggctttgttgccagattttctagttttacctgaaccacaagctcagcaagttattctgtgtaatattgatcatcagcttttggtgcgtgagaataagtggttaggtaattccattgatgacttggggctttttttagagttccagtcagccgaaacacattatcaatatagcggtttaacagcagagcaactagagagcttagaagccgcttcaagcgcagagcaacgttctgagtttgtttatcaatttcagcctttagataaaactaagcagcatccttttaatgttttgccaaaatcaaaagggcaagaacgtactttttctagttattggaaagcttgtgccgccgttgttctagcaattattgtcgtgcagtttagctatgatttattgcgttgggtaaaattgaaaaaggtggcagatcagactgctgaacaggcaattgagcaatataaatattggtttggtccatctagtcgtgtgactgaacaaaatattaaaggacaattcgaaagtcatttaagaatgagccagcaaggtgatacccaggcactttctctgttaagccgggttgggcctattttaatgcaaagacagattttagctcagcaactcaattatgatgcttcaatcttaacaatggcactaaaagcaaaatcagcagatgatttgcaagctttaacccaacaacttaatcaacaaggttttaaagctgagttaggtaatgttcaagctgatggtaatggtgcgattggggtggtgaaaatacaataatgaaaatgttagctcagttgcaaaaccgttttgatcagtgggttgaacaaattgttcaatatttagatcgcttaactgtccgtgaacgtattatggtggtctttactactatttttgttgtagtagtcattgttggatattcactttggaaaatgcattccttggcagaacaacagcaaaaacgtttaaatgatttaaaagatttgatggtgtggatgcagagtaatgcagtcacgatgaagcctgccaatgagcttgaactagataagtctggaaaaatacaacgagtagctcagcaacaaggtttaactgtgtcttcccagcaaaatggggaacagttacaaattgttgtaacacatcagaattatgcaattttggctaactttttaacacaacttgcacagatgggcttaagtattcaaaagatggaaatggtttctagtgaaggtcagattaaattaacagcgacagttcaataacatatcaaaatatgcttgtgtcaagcatggtgttttgtgctgcctgtgcctataatatgcgtacctaaaatcagtagactgtgattggtatgttatattcacttgctcgcccgatgttgtttagtttagcaccagagcgtgcccatgaattaacattatccatgcttgataaagcgcataagctaggcatgatgcgccagaccgtagaagcaaagccaactacatgtatgggaatcgaatttcctaatccggtagggttggcagccggtctagataaaaatggtgctcatattgatgcattagctgggttgggtttcggtttcattgaaattggtacaattacacctcgcccgcaatctggtaacccaaaaccacgtttattccgtattcctgaagctaaagctattattaaccgtatgggttttaataatgatggcgttgataagctaatcgagaatgttaaagcatcaaaatttagaggcattttaggtattaatattggtaaaaatgctgatacacctgtcgaaaaagccgttgatgattatttgatttgtcttgagaaagtttataactacgcttcatacattacggttaatatttcgtctccaaatactaaaaatttgcgtagtttgcaaagtggtgatgcattaactgaattattgcaaaccttaaaagcacgtcaacttgagttggcagagcaatataatcactatgtacctttagttcttaaagtcgctccagacttaacagctgaagatgttgaatttatttcggcacaattattagattttaaaattgatggtcttattgtgacgaacactaccttatcgagagaaggggtagagaatctgccttacggtaatgagtcaggtggtttgtcgggtgcacctgtatttgaaaaaagtacggaatgtttacgtttatttgctcaaacattaaaaggacaaattcctttaattggtgtgggcggaattttgtcgggtgaacaagctgcagcgaaacaacaggctggagcaacgcttgtacaaatttatagtggtctgatttatacgggaccaacgcttgtgaagcaatgtgttgaagccatgacttaattgaacatgaacaccattgatatcatcattctgatacttttgctcattggggggctaaacggtttgcgacaaggatttataaaagcctttgcgaacttggtaggatggatttttgcattaattatgggtgcaaaatatgctgttcttctagctccgtcaatgtcaggtttaagtcaggatccggtggttcaaaagatcgcggctttcgcttttattgcacttttaattatcgttttaacttggatcgtcactgcatttttaaatggcctcttgaaaagtttgaagttggggccattaaatcgtttagcaggtggtgcttttggttcgttgaaaggtttattggttgttcttattaccatgcagggtgttggtccttgggtagaaagttcgcctcattggaaacaatccaaatttatccagtttttattgccttatgcacctttagcgacagagctttctaaagatgcagcaagtgaggcattgcatcagataacatctggaggcggtgtaacgcgcacttctccaaaaccaatggacgagtcggaggaaacagaacttcgacctgaccattcaacaaagaatcctttttattaattcctagcttgtctgcgaggttgctatgtgtggagttgttggtatagccggtaaatcgccagtgaaccaaatgttgtttgatgcattaacgatgttgcaacatcgtgggcaagatgcagctggaatagtaacctgccatgaaggccgtcttttccttcgtaaggataacggtatggtacgtgatgtttttcatactcgtcatatgagagcattacttggtaattacggtattggtcatgtgcgctatccaactgctggttcttcaagcagtgcggaagctcaaccattttatgtgaactcaccttacggtattacacttgcacataatggtaacttgacaaatgcagaagaaattcatgatgacctgttcaaaacagatttgcgtcacatgaatacggactctgattcagaagttcttttaaacgtctttgctcatgaattgcaaaagataggaactttaaatcctacaccggaagatattttccataccgtttcacgtgtacatgagcgctgtcaaggtgcttatggtgtagtggcaatgattactggtcacggcttagttggtttccgtgatccaaatggtatccgtccgcttatttacggttctcgtgtaactgagcaaggcgagatggaatatatcattgcatctgaatcagtagcaattacagcgcttggctttaaaattgagcgtgatattgctccgggtgaagcaattttcattaatgctgacggtgagttatttacaaagcaatgtgcggcagatccaaaataccgtccatgtatttttgaatatgtttattttgctcgtccagatgcaattattgatggtatttcggtttataaagctcgcttaaaaatgggtgagaaattagcgcataaaattttgcgtgactggggtgaagaccatgatattgacgtggttatcccaattccagatacaagccgtacctcagctttagagttggcaaatattcttggcgtgaagttccgtgaaggttttatgaaaaaccgttatatcggtcgtacctttattatgccaggtcaacaacagcgtaaaaaatctgtacgtcagaaattaaaccctgttgagttagagtttaaaggcaagaacgttctattagtggatgactcaattgtgcgtggtacaacgtgtaatgagatcattcaaatggcgcgtgactcaggtgcgaaaaaagtatactttgcttcagctgcaccgaaagtgatgtatccgaacgtatatggtatcgatatgcctgctaaaactgagcttattgcttcagaacgcagtgtagaagaaattcaggaaattattggtgctgatcgtttaattttccaagatttggaagatttgaagaacgctgtacgtacaagtaaagtacctacattaaccgagtttgattgctctgtttttgatggtatctatgtaactggtggaattgatgcagactatctgaataatttggagcagaaacgtaatgattctgcgaaaaagaaaaaagatggttatattgatgtcaatattgatgcagcatcagtagatttgaccggtattaaagaagaatagaaatagccgaaaaaagcgggtatttcccgcttttttcttttatgatgaaacttaacaatgtaattgggattatttacattgaaagaagtaagccactatttaatcgaaaataaaaatatggcatggtccatcactatgtgtttggttgctgtgcttttaactatttttattttaaatctaattttaggtttacttgttcatttctttgattatagcgagccaatttggtggcatgctttaagtccatattttattgctcttttgctttttatcatggtttggtctgtggtgaccgaactttatattttgcgtaaaggtggccattcacttgccaagcagttgaaagctcgtcgtttggtaaaaggtgaaagtacaccagaagaacatgccgcattaaaaattacagaacatctggcacaaacattttccctgaacgttccaacactttatgttttacctgatgaagtaggtgttaatgcattaacggcaggctttcactcgaatgatattgtaattattttaacttggggtgccttacagaaccttgatgagctagagctatatggcttattgggtcatgaatttaaccagattttatcgggtgaagcagtagaaaatactaaactaaaaattttatatagtggtttgactacttttagtcagtgggggagtaagctcgccaaacaagggtttaagcgctacagtccgggttataagcataagttcgagactgtatttgtagccgtaggtggtgtgatttggttagcgggaagtttaggtgttttaatcactcgttttattaaatatttaacattaagtggtcgtacatttcgtaatgaccaaaaaaccatgcggttattaaaaaatagcactaatacccaaactttattgcgtatttacgttcaccattctggttcgcagattcatagtgcttattctgaatcgattgcacatatgtgttttgcgaattcacttagcccgcaaagttggatgaatattcacccaagtattcgtgaacgtatttatgagcttaacccaactttattacaagatttgcaattagaaaatttaaagaaacttcgaaatcgtcctttatttagtttgttccatgtactagaagaatctgagactgaaatttatacgccgtggtcatctccacaacctttgcctttgttgcgtctttctccaatcagttttgctttgaatgatgcaattaagccgttaagcagtgatatccgtcgtaataaaaagcggcctgaacttattcaacgtgcattacaaactgcgactggttcacgtgaggtgatggttgctattttaatgattcgtcaatatcgagaatttattccacaagatgcgccagtaagccatgcaattgtggatgccttacttaatcttgatgggcgtattcatattcagatatttcatgatgcatgtaaaaatattggtcatatgcctgccagtattgctcgtcaatttttgactaaactggcccttattattcaggaagatggggaaattggattacttgatgcacttctactcgagcgtgttaagtacgagttaaacttaatgccacttcatttgccgacagcatttgaagaggtaaaacctcaaattgttcgtttaattgatgcattacttcatgtgcaacaaatcaatagtccgaatcagttagaggttcgcgaacgtatcttacgttctttgcttaatcctgatgaaatgcatatttatgatgaaatttcggatgaacctttagacttagcagaaattttaaatgatattgctggattattgctgcgtgaccgcttaagtatattggcaattgctgaaatgtgcttgtggagtgatcgtattattactcaagatgaacttgatgtgcttgagttgctctattggcgatttggttttgagtctgatgaaattgtagagcaaatgcagaagaaaaatagcgttatgattatttaagaaacatatgtggtttccaaagagtatcattaaaagaaaacgctgaaaaaaaatcagaagcccgttagaatgtgtgtagattagaggtactgatttagacatgattgggcagcaaagaaatatactggcaactttaggaatagacgtatggattcctagaacacaagtgtgccaaaaaaataatgcccatactttgtggcgagatcaggttgttgaacctcatgagtcaattaccgtacctaccatagatgttcctgcttttgagcaaaagaacactcagccacaggtgtttgaaattcctaaagtggtggaagagccaccaatagtagttgcagaagtttcgcagccagagatacttgtagaaaaacctaaagtcattgcgcaagagacaattactccatttgagttacaggcttattgtcttgaaaaatgtgtaatttttgttgatgtaacggctttggaaacagaagaaaaacaactttgggtgaatatacaaaaggcgaaggtgggacaatattctgaattaagatggcctttccctctggcagcctatcaagatcaacgaggggtaggttcttatattcaaggtttcttagatgctgtagcaacagagaaaaagattttatgtttgggtaaatgtacctatattcaacatgcaaatattattcatttagctagtttaaaagaaatgttagataagcctcttcttaagaaaagattgtggcaacttatgcaagataacaatgagtagtagggatttacatgaaaaaggttgtggtttttagccaaattgatgaggaaattttgtcacggttacagcagcattaccatgttgtcgtattgaaccctaaactgggtgatattaatgaacagatacgacaagaagtagtagatgctgatggcatgattggggctggtcgtttgctcaatgaaagtaatctttctcctgcccaaaaattaaaaattatttcttctgtgactgtaggttatgacaattatgatgttggttatttaaatcagaaaaaaatctggttagcaaacacacctcatgttctaactgaaacgacagcagatcttgcttttactttgttattaagtgcagccagaaaagttccttttctagatcactggactaaacaaggtgagtggaaaagaacagttgggccacagcagtttggtctcgatgtttttggaaaaacattaggtattattgggcttggtaatattggtgctgcaatcgcacgtcgtggcttttatggatttaacatgaatattgtttaccataatcgccgcgagaaacctgagttggcggaacctttaaaagctcaatatctgggattggaagaattattacaacaatctgattttgtagtgacagctgttgatttaaatgcggaatctaaagctttaatgggtaaggctcaatttgagcttatgcaaaagcatgccatatttattaatattgcgcgtggctcagttgtcgatgagcaagccctaattgaagcattgcaaaatgaagttatttttgcggctggtttagatgtctatgagaaagaacctctgcaagaatctgcacttttcaatttgccgaacgttgtcactttgcctcacgtaggttctgctacagctgaaacacgtaagaaaatggcaaatttagcttataaaaacttggtggaagcactagaggacaagacgcctagatatttagtgaatcctaattttgtgtaaaggatgaataacacttcattgcaaatatagtctattttcaatgttatagtgaaagcctgttgatatgatgcaaaataactgaagcatgatattgatgggcttttttgttattttaatttttaataagagaagaacttttgaaatttttgccagttattttaagtttggctttgataacaaatgcctcttacgctaatccttttgaccccaaaccagcttctgggcaggttgaaattccaaatattggaagtggaatagggctgctcgaccaacagaaagaaaaatttattggcgaaaaagttttccgtgaagttcataagcaaatgtcggttatacaggatgtatggctagaagatcagttttttcaagttttctctaatattttaagtgaaactcagctggggcagccgatcgctctggttgtaattaaagacccacaaattaacgcatttgctgttccaggtgggttatttgcattaaatactggccttatctcatcggcacgaaatattgatgaaattgcgggggtaatggcccatgaaattgctcacgtttcgcaaaggcactttagtcgttcggaagaagcttttaaaggacaaactcttttaagtttggctggtttattagcaggggtggctttagctgcccaggctggtggagacgctggtgctgctgttatgttgggtacacaagcagcacttcttgataaacagctcacttatagtcgtaatcaagagcgtgaagcggatcgaattggtatgcaatatatgtatgccgctggttataacccgcaaagcatggcggattattttgaaacgatgcatagagcgacgagccgtgtaagttttttaccagatttttggctgactcaccctcttacatctgaacgtatgagtgaggctcgcttgagagcaaaccagatgcctaaagttaaaagtcgaatatatgatgtcgattttgaaattttaaaatggtataccatggtggttgctggagaagctactgaaaatcagttgcaaagtctggcatcgcaaaaaaatctggcaggcttattggctttgtcggctttctatcttaaacaaggtgattatactcaagcccaagcaacgttggagcaggcgaaatcaagcggtaagccattagttgccttaattcaaacagatatttatttaggccagaataaacttgatcaggcctataattcaattgctcccttgcaaatgacaatgcctgaaaataaagcttttagctacaaattggctgaggttttattacgtcaaggtaaatatgctcaagtgcaaactttggtgcagcgttttattaataaaaatgcccgagatattcaaggttggcaattattacaacaagcagccaatttggataaaaattcgccattaagagctgtgaatgtattgcgatatcgtgctgaagcacagtactggtctggtagtgaagaggatgcaattaaatcgatgttgcatgcacaacgtcttgcaaaaggtaatcaggccatgtcagccagaatagatagtcgattaaagcaaatgcaagatgagcgacgaatgaaaatctaaggtctaagataactttggaattttcacaggcataaatatacttaaacttataagaaagtttaatttaaggatatataagaagagaggggattaagctaatttagctttaatttttgctgaaacttgagcaggatcggcacgcccggctatgatcggacgtagagaattcatcaccttacccatatctttcatgctagttgcttcttgagcagcaatcgtttgctcaatgagagaatcaagctcttcctcagtcatagcttctggtagaaactgagataaaacctcagcttcggcttgttctttactagctaaatcatcacgaccagcaccttcgaaggctttgatcgattctttacgttgtttaatttgcttttcaatgaccgcaagaacctgagcgtcgtcaagctctatgcgctcatcgacttcgatttgcttaattgctgcttgtagactacgcaaaaccgtcactgttgccatatctttggcacgcatagaagtttttaatgcatcagtaatttggttttttaaagtagtcataatgttagcagtcaatcacaaattaattagtaaaggcgagtagtacgtacagattcgcgagccaatttcttttggtagcgtttaactgcagcagcttttttgcgcttacgttcttgagttggtttttcgtagaattcgcgtttacgaacgtcagctaaaacaccagctttttcgcatgaacgtttgaaacgacggatagctacgtcaactggttcgccttctttcaacttaacttgtggcatgtaaaatcctctagattatggataagatcaggcacaccattgcgccagatcacaagtgaaggtcagtattttactcatttacaactcatatcacaagtctataatagcgattgcaatattttgactcatataaaaggcagttttgatgattgttttaggcttggaaacttcttgtgatgaaacagggttggcactttatgatagcgaactcggcttacggggacaggttctttatagccagataaaacttcatgccgaatatggtggtgtggttccagagttagcttctcgtgaccatgttcgtaagcttattcctttaatgaatcagctgcttgaacaaagtggtgttaagaaacaggaaattgatgcagtcgcatatacgcgtggcccgggtttaatgggagcgttaatgaccggagccttgtttggaagaactttagcattttcacttaataaaccggcaattggtgttcaccacatggaaggccatatgttggctcctttgctttcaagccaaccgcctgagtttccatttgttgcattgcttgtttcaggtggtcatacacaattgatggcagctcatggtattggtcaatatgagctattaggtgagtcaattgatgatgcggcaggtgaagctttcgacaaagtcgcaaaaatgatgaatctgccatatccgggtggaccaaatattgctaagttggcgttatctggtgatcctttagcatttgaatttccacgcccaatgcttcatcagggcttagacttttcttttagtggtttaaagacggcagtttctgttcagttgaaaaaattgaacggcgaaaaccgtgatgctgatattgctgcttcattccaagaagccattgtagataccttagtaaaaaaatctgtaaaagctttaaagcagactgggcttaagcgtttagtaattgctggtggggtaagtgcaaatttacgattacgtgaacagttggaaacttcattggcgaaaattaaagctcaggtttactatgcagaacctgctttatgtactgataatggtgcaatgattgcatttgcaggttatcagcgtttaaaagcaggtcagcatgatggtttagctgtcactactacaccacgttggccaatgactgaacttactattcctgagtaagattattcatcttcaaaggcttgtggattttcgatatcaatatattcgatgtatccacggccttgaacttcattgccaaaataatgaccagtaaatatatagctacttgcataacctcgcccatgaccatagcggaatgggcagtcaatttctgcctgaatgtttaagataatttgctttgcatcatttcgagcgatccatgaaaaatattttggaagtcgcattttttgcccactaggtgaaacgaagtcatcaacttgatgcgaaataatatcaaagcttacatctgtgtaaatttcagctggctggtccagatgtctaatatgcagggtgtatgcagctgtttgtcctgcaatatcggctttggtaagaagaagttgagtggcctcgtttaaattgataatttgataagtaaaaaaatcaagtggcagtttatatgcatcaggaataagtttatttgtaatggagtgaggacccactgctcgtgcatattcgtaagtacaaagtccttgggtttcaatgcgttttgcttgatagtttaaaaaacctttaaactttgccaataaactaaaatgatcatagattggtgtttttataaaccatgaaacatgtgaagtgatatcgatatcaaagtcgaaatcaaacccatcataatgtccattaatatggatgtgtggaaattttccttgaattgaaatttcctgacctagttctattaaggttccatctttattaatttttgtatcttcagaaatgatataggccttcagtaaagcttgttccagagcagctgtgcttgaaaagaaagtagcggtttttctcgggtttccagtgatgatgtcatcatggtcaaaagcaagtgcaccgggcgtaccgattaaaatcataatatttaagtaacgatgcggctctggtaaaagtgggaaaaagataccgtagtgtgtccagctataatatttttcgtcaattcgtggacggatgatatgagtttgagtaaaaggaagagttgaatatttttttgcttggtctaaaacgccttgtgcaagtaataaacttttagcaagcgctttacttgttgtagaaatttttggcaattgttttttcatatataaacctaaagaagggctatctttgttttaggttatgaaaaacaactgccaaagctaagcggtttataggccaaagctaaggctttgcgggacattttatttaattgttagacaaatcttttaaggcgtttaaaccaatccaatgcttagaaaactgataagcagctcgaccagagcgctgaccccgcatttggcaccaacgcaagctttcagcacgaacttcatcattaaaaggcatgtttgctttatctagataatgctctacgatttctaaatataagttttgatccattggataaaaagataaccacaaaccaaaacggtcagacaaagagatcttttcttcaatcgcttcttgcggatgaagctcagtatattgaggcacatctactttggttacaggggtgttttcatgcatgaactcaggtaataagtgacgacggttactggtcgcataaataataaaatttgttgaacccgactgtaaggaaccatctaatacgctttttaaactacggtaattttcatcttcagcattaaatgctagatcatcacaatagacgatgtatttttcaggtcggttttgaataattttttgaatttttggtaagtctgctaaatcatcacgttcaatttcaatcaaacgtaatccttgaggtgcatactccgtgagtaaagcacgaacaatagaggatttacccgtaccacgtgaacccgttaaaagtacatcatttgccggtaagccatttaaaaactgcaaagtattttgaatgatcttttctttttgtctttcgatgccttttaagtcatcaagataaatatttttaggtgtataaatagctttaagctgctggttttcccatctaaaagcaggggcagtaaaatcggtctcttgtttcggttcaggtaagacctgctgtaactgatttaatacaagtgataaggtttgaactaaattgtcgggtaaatcaatggtagccatggttaatcaatcatgttaaacagtaatttactaggatactaacaccgaaatttgcaagctgacaaaaaagatacgactcatgcagtttatcggttttgcaattgattgaaatgttcagaccgcgcatagtgttgtcatgtctattcagtaaaatcatctgtgaagatgaggacgaaatatgtttgaaaaaatacgaagtgatatgaatccgcatcaggcttaccgtatcaaaaaattacaacgtcagttagacatggctgaatcttatgaagagtggaagtcttttgcattaaaactggatgaagaaactggggcgcaagagtggaagtttgataatagttcgccttacttcgatgccgagctcatttcttatcgttacactttactgaaaagataccgtcagcagcaccgcactttagatttgatttatcttttaaaagaagggttgacctacgatattgcaaatattggtcaccctatgttgtttgctgccacacatgtaggcacaaaaaaactaattgaagattatattgaagaagtcagccaaagcttggcttatattgcatctagtgaatgtattacattccaaagaaaagaaaaaatcgaattttttgaaaactgtgaaaaagcatatggacagcctgctcttatgttctcgggcggagcaaccttaggtctttttcataccggtgtatgtaaggctttaattgaacaagatttaatgcctaaagtcctgtctggttcaagtgcgggcgccattatgacgggtatgttgggaatttctgccagtgaagatatccaaaacttgctaaatggtgagcaattttttagtgatgcttttcactttagaaaacttcgtgaacttataaaagggaatggagggattgccgatgttcactatttaaaaaaattcttaattgaaaatttaggtgatcttacttttgaagaagcattcaaaaaatcaggtttgaatattaatgtcgctgttgcgccgtacgatgcaactgaaaaccctcgaattatgaatgcgattatgactccaaatgttttggtttggagtgcggtattggcttcttgtgctgtgccagttttatttccacctgtgcgtttaaccagtaagcgttatgatggtgaacatactccatatatggcaaatactaaatgggtggacggcagtgtacgtagcgatttcccacaagaaagaatggcaagactttataatttaaactacaccattgccagtcaagtgaatccgcatgttgtaccgtttatgcaagatgatgcgcgccgtttccgtaaagacgttttaagttggcctgaacgaattttaagacgccaaggtaaagtactctcaatggggctgatggactttacacgtcaaagattaggcgcaatttcacccgtaagaagactgctcgatcatggatatggcgtagtagggcagcgctattatggtgatgttaatattattgctaaatatagcttaaaacattatgcctatacgctacaaaacccacgcccacatttgtttaaacgtttacagcgagaaggtgagcgcgcgacttggccgaaaatctcttctattgaaacgcacgcgcgtattggtaaaacgattcagcactgtttagaagttttacgttttgaagaaaagaaacaacagccagaatcttattatgctgaagcatgattttgcttctcatatagaaaacctaaaatgtgcgacaaagcctagaagtgaagctttaggacggcatctatggacatgtactataggtgctgattcctactggttaaaatttcatttgccaaatgtacatgctcaaagtgagcaagattttttgcatgaattgcaattttatgtagatattacatataaaaaagcgaattggcttttgccatttaaaattatcgagggcagtactgtttctcaacaaccacaatttcaaggaagagtattagttttaccggatacagattgttggtttgatgatttagatcaaaagcaaaatttaaaaaatataaatgagaaaatctatctgacacttgttaagttagcagagcttcatgagttaggatggattcatggtgatattaaaaaagaacattttcgaaagtttaagcaagagctttatttaattgactttgaaaaaacacggcttgtttcaagccctgatccaataactgatgctacaccacggtatatggcgccagagctatttcatggtgccaataaaaccgttcaaagtgatttatatgcattgggaatcgtattgtatgaatggttaacacaaactcgtttacaagcaaatagttaccatgagtgggcggtattgcactgtcaaaaattaaatgtggaattaccaagttcgttccaaattttcttgccactactttcaggcttgttacaaaaacagcagcaaaaccggttttcaaatgtacatgaagcgataaattgcttaaaagcgctctcaacctgataaaaatcattgatctagtaactgtatacaaattactcggtcagttttttttgaaaaaaaacacttgtcactgttagatcttatcgctaatatacacagccatcgggggcgtggcgaaattggtagacgcactggatttaggttccagcgccgcaaggtgtaagagttcgagtctcttcgcccccaccactttaagttaagtcttaaagtttgatatagatgttaagacatctagatctcggaagaggattggtgtaatggtagcatgacggtctccaaaaccgttcgtcaaggttcgagtccttgatcctctgccacatttattttaaataaatgtcccagatgggggcgtggcgaaattggtagacgcactggatttaggttccagcgccgcaaggtgtaagagttcgagtctcttcgcccccaccatagaaagaagcaagacgatgatcttgctttttttatgattaaatctgaatgatttaattgtctatagaggattggtgtaatggtagcatgacggtctccaaaaccgttcgtcaaggttcgagtccttgatcctctgccaagattctaaaaaagctccttttgtggagcttttttatttcaatatcagtacctacctttaattgttagctattcgcttctcaagcatttccataaaggtttttaaaatattattgtgatttttacccttatgagtaattaagcatataggggtgctgtagtgcattttgtcttttaaaacaggctgcataacaccgtcttcaacccatttttttgcatagtggtcgggtaaaaaacctaaaaattttccggttaaaatgagaaaggcaataccttcgcggtcacttgcggtcgctttacaatctaaaagctgatgcaacttggccgcttccgaggtaatggcataattaggaagaatagcttgccatttttttaattcatttaaatgaatgttgctacattggttaaataaaggatgatttttgccacaatataaaaatgaactttcactatataaatcaaaatagtctagaccggacaaaggtgtaacaagggggataacacctgcatgtaaacggttatcgagtacgcggcattcaatatctgacaaagtactcatactaatattaataataacttcggcatgttcttcggcaagttgagtcaaggtgttggtgatatagcctctaggcatagttacaaggttgttaataatgccgatattaaactcacccttaaggcggttatgcatttggttgactttagaacggaagtcttcaatcgctgctgtgagcacttcaatatattctaaaatttcccgcccttcgtcggtcagggcaaatccggcacggcctcgctgacatagccgaatgcccaaacgattttctaaatcactcatatgcaaactaatggcagagcggctaatacctaaaatactttcggcagatgtaaagctgtgacagtcgcaaaccgttttaaatatttttagaagttttatatcaaaatcagtgacttgatttaattttttaggtttcatttagttttgtttttttaaatctaaactcaagataatttgaatttatcaaacttatctcgctatgtacactcaaaccataatttgaaaataaacaggaatggttatgtttgatacggataaatttagcgactcagaacatactttggatgcggttcaaactaataataatatgcacataaattatcaggtgcactggatgcctttttcagcaaaccgaaactttgctaaagacccacgtatgattgtgggtgccaaagggtcttatctgattgatgattctggccgtgaaatattcgattcactttcaggcttatggacgtgtggtgcaggtcataccttgcccgaaattcaacaagcggtgagcgctcagttaggtcagctcgattactcaccggctttccaatttggtcatccgctttcttttaagctggcagataaaattgttcagcatatgcctgaaaaactacaacacgttttctttaccaactcaggttcggagtcggcagatacgtctataaaaatggcacgcgcctattggcgcattaaaggcaaaccaagtaaaaccaaattgattggtcgtgcccgtggctaccatggcgtaaacgttgcgggaacaagtctaggtgggattggcggcaaccgtaaaatgtttggtcagcttatggatgttgaccatttaccacatactttacagccgaatttaacttttaccaaaggctgtgcagaaacaggcggggtagaacttgccaatgaaatgcttaaattaattgagctacatgatgcttcaaatattgcagccgtcattgtggagcctatttccggttcggcaggttgtattgtaccgccaacaggctatttacaacgtttacgagagatctgtgatcagcatgacatcttgttaatttttgatgaggtgattacaggttttggtcgtttaggaacatggactgcggcggaatatttcggagttacgccagatattttgaactttgcgaaacaagtcaccaacggtgccattcctttaggtggtgtggtggcaagccatgaaatttactctgcgtttatgcagcaagacttaccagaacacgccattgaatttacccacggctatacctattcggcacatccggttgcttgtgctgccgctttagctgcgcttgaaattttagagaagaaaaacctgctggctcaatcggcagcgttggcaccaagttttgaaaaaatgctgcatggtttaaaaggcgcaccgcacattttagacattcgcaactgtggcttgattggtgctttgcagttagctccgcgtgatggtgatgccaccatccgaggctttgagcttggtatgaaactctggaaagaaggtttctatgttcgctttggtggcgacacgcttcagttcggtccaatgtttaacagtacagaagcagatattgaccgcttaatgaatgctgtgggcgatgcactttatcaagtgaattaaagtttattaggcattttatcggggtctgtaatgtcaacagacctatcttcaaaatctaaatgaaaaatacagtttgatctgaaaactaattgtagtaaggagtaacaacaatgacaaatggcctagaagattttagctatgacgaagtttcaactgaaaatagtacgcagagtgaacaagccaaaaaagtgctagggcatttcattcaaggaagaattgtatctaaaacggcaagaaaacagccagtttacaatcctgcgacgggtgaaattagtaaagaagtcgaaattgcagatgcacaaacggtaaatgaagcagttcaggcagccgagcaagcatttcctgcatggcgagatacaccagtcattaaacgtgcacgtgtcatgtttaagttcaaacaattattagagcaaaatgccgaaaagatttgcgctttgattgggcaagagcacggtaaaatttctcatgatgctcaaggcgaactgcaacgtggtattgaaaatgttgaatacgcttgcggtgcaccagagcttttaaaaggggagttttcaaaaaatgtcggtccagatatcgactcatggagtgagttccagccgttaggtgttgtggctggaattacaccgtttaacttcccggccatggtggcgttatggatgttcccaatggcactggtttgcggtaactgctttattttaaaaccttctgaaaaagcaccttcagtggttttattccttgctgaacttttaaaaaaggcaggtttacctgacggcgtgtttaacgtggtgaatggtgacaaagaagcggtagatgctttattgcatcatcctcgcattcaggcagtcagctttgtgggttcaacaccaattgctgaatatatttaccgtaccgcgacttcaacgggtaaacgttgccaagcattaggcggtgcaaaaaatcatgcgatcattatggctgatgccgatattgataacgtagtgacttcattattaggtgcagcttttggctcttctggtgaacgttgtatggcactttcggttgcagttgccattggagatgaagttgccgatgttgtgattgataagctgactcaagaaatgaaaaaattgaagttcggccactatgcagatgcaagcaacgactttgggccacttattacccaagcgcataaagacaaagtgcaggcttatattcaaagcgcagagcagcaaggcgcaaaaattgtggtcgatggccgcgatgcaaaaccggcaggctatgaaaaaggtttctttgttgggccaactttaattgatcaagtcacaccaaacatgaccagttaccagcaagagatttttggtcctgtgttgcaagttatgcgtgtaaataccatgcaagaagcgatgcaactcattaatgaccatgaatatggtaacggtacttgtatctatacccgtgacggtgaggcagcacgctattttagcagtcatattcaagtcggtatggtgggtattaatgtgcctttaccagtacctgtggcttatcatagctttggtggctggaagcgttcactgtttggtgatttacatgcgtatggcccagatggtgtccgtttttacacacgccgtaaaaccattacacagcgttggccatctgctcaagtccgtgaagcaaaacaattttcaatgccaactttaaattaatttttattattagggaaaacagccgttttcccttttttcatgactgtaggattttgaaatgtaatagatcgttttgatggatatatttttaaggaatgaaatatgaataatgatagaacaaaaaaattaggcgaaggactttcaaatcgccatatcacaatgattagtattggcggtgttattggtgctggtttatttgtcggttcatcttctgcaattgccaaagcaggcccagcggtgattcttgcgtacctgattaccagcattatggtttttctagtgatgcgcatgttaggtgaaatggccgttttagagccggacactggttcattttctacctatgcccgtaaagcaattggcccgtgggcaggctttaccattggctggttgtattggtggttttgggtacttgcgattccggtagaagccattgcaggtgctgaaattttacattcgtggtttccgagcgtttcagtttctatctatgcgttttgctttattgtgttcttaagcttagccaacttttttagtaccaaaagttttggtgagtttgagttctggttttctttggtcaaagtggttgccattattggtttcattattattggtattttggcaatttcaggtatttggcctttagctaaaaatgtcagtggtgttgctaatttatacaacaacgctggttttatgccgcacgggatgggaggcattttagctgccattttaattacggcattttcattctttggtgtggaaattgtctcgattgccgcagcagagtcatctaaccctaaacagaaaattagacgtgccaccaatttggtgttgtaccgtattattctttttttcgtggtctcaatgtttattgcggtttcacttgtcgattggcgttcaccggacttacaaaagtacgggacattccaatacgttttaatgagcttaaacgtaccgggcactaaacttattattgatacggtcgtgtttatcgccgtagcgagctgtatgaatgcggcaatttatacgtcttctcgtatgttatttcgtttgggaacacgcaatgaagcaccgcaggcagtcactaaagtgaactatgctggtgtaccagcaattgcggtgttttcctcaacttttattggtttagtgtgctgtgtcataaactatgtatttcctggaaaagtctttggcttattgctctcaagcacagggtcaattgctttactcgtgtacttggttattgcgttttcacaactacgtttaagacataagctagaagcagttggagcggaaattccatttaaaatgtggttattcccatggctgacttggtttgtgattatcattattttaagtgtattggcttatatgttcttctcaccagcctatagttatgaaacgactctatctttaggtgtaaccttaggtgtggtggtttgcggtttgtttgtgacccgaaagcgtaaagcaacccgttcggttgcgatcaatcagagtaatttataaaatattaaattaatttttaatgatataaataaaaagctccttaataaaaaggagctttttacttttttaattctaattattttattttaattgtaggtgggtttttataataatataaagagttaaaagctaactaagcaaagacgtttaaatcgcttgccagttttctttaacttcttctgagtttttatttaaaatgacttgatcttcttttacctccccaatccatgaagtagggataagatgatgttgatcattttcatctttggtgagttttaactgattttcaccttcaagatgatcgacagttcctactttggtgccacaagaagcaataacgtctgcatgttttttaatatcattaatatttaaagtattcatctttgacctcttctttggaaatagaaaaacggtagaaactaaattactggataaaacagcagaaatccttaatttttaataaaccttacatgattattttataatttcacttaagcgatatatttaggtaacaatgaaataaaaagaaatattcattgaataaagttatagaaaatatctttttattacattttatatctttaattaaacagaattatttcgatatgtttaagtgaatacttttgaataattatttgtaatgaatattaaaatatctataaatatgacaatcttgagtatgttgagtgaatttgaacatgctcaggccgaaaacaaaagtcagctccgccaagatttactctaccaattggtaagtttatctaaaagtttgccttatccagcttcaggtcatacctatcagcgatggcaattgtttgctcaaattgcagggtatgatttaagtctcgctaaattatttgagtcacatcatgatgctttaagtattctaaatgaattgggctatcaagacgaaatcgatgaccaaacttgggcggtatgggcagcagatggcggaccggcacctgtacaggtccagaacaatcactgtaatggcataaaaacctggtgctcaggtgcagagtttattcaaaaagccctaatgagttataaggacaaagaaggccaagcacagctttgtatcgttgatttggctcatccctctgttcatgttgacttgagccactggcaagcagtcggtatgcagggaacccaaacagctcaagtgcattttgacaatactcctgttattcctatcggactgccaaattgctatttggaacgtccgggtttttggcatggtgctgctggtgttgcggcttgttggtatggtgccgcggtacgcttggttagcttcttacataaaagttgcacccttaacccaaacgcatttaaaaaaatgtatttaggggagttggctcaacagctctctgtaaccaaacagtattttcaatatattgccaagctcattgatgatgagcctgcgctcagccatgagcgtgaaatccgtatattacgtgcccaaacagaacaatgctgccagagtgttattcaactcgttggtaaagctttgggcgcgcgtccttattgtgaagagcctacattttcacagctcatcgctgatttaccagtatttatccgacagagccatgcggcttttgattatgagtctattgctgagctctgtttaccggagaaaagcttatgggaactttgaagcatcccttagtagaggaccgtatgatttcaggtgaaggtacacccgaattcatgtggcttgaggcatttaaaaagaatcctttagatcggctgaatttaaagttgtttcagtctaaaagagtggtgattgttgctccgcatcctgatgacgaagtgctgggttgtggcggcttaatgcagcagctagttgagcaaaactgtcatattgtcattttggcagtcagtaatggaacacaaagccatcctcattcagtgaaatatactcctgaccaattgaacgatttacgtccgcaagaaacactggctgctttaaacactttaggtatttcagctttttctgaacggattggtttaaatctaatggatggtcaaattcatttacagactgatcaattgaatcaggcgcttagccaaatagttcagcccgaagatattttaatttgtagctatgcacttgatggccatccagatcatgaggctgtcgggaaaacagtacaagcttttgctgaagctcgggacttactatgtttgcatgtattgatttgggcatggcattgggcagagccttttgacacacgaattaactggtccaaagcaaaagcttatgccttaactgaaaaccagttaattaaaaaacatcaggcggttatgcaatttaaaacacaacttgaagccgatgagagcacaggaaattccgccgttttatcctcaagtgcgattagccgtcttttaatgccttatgaggtatatctgagtgattcattctcgtgtgtattttgaagagttgtatcgtagtaataatgacccatggggctatgactatcactggtatgaagcccgtaaaagacaaatctgccttgcattattaacgcgaccacactacgaaagagttttagaaattggttgttcaaatgggcatttaagtgtttatctggctcagcgcgctgctcatctgttatgtattgatgtgtcgaagcaagccgttcagctcgcatcccaacggttagaagcatttgaacatgtgactgttgaaaatagaaaaatacctgaagatttttatgaacaaaaatttgacctgattgtaattagcgaagtggcgtactacctcacattcgatgagttaggtgagtttattgaacagttaaagcaggccttaaacccggaaggggaaattttgtgttgccattggcgacatgatattcaggattttgaattgaatgcccaaaaagtccatcaaagctttcaacaatcttttccatttcatcactatttaagtctgaacgatccggactttatggtagatgtttggacggttaatccttcatcaatagctcagcgagaacaattacgatgaaaataggtgttgtagttccagcgcataatgaagagcaacatttgcccgcctgtttgcaatcaattcaggaggcgattgaaaaagtaccggatgaacaagtcgaggttatggttgtacttgatagttgtacggatcagtcgcgctcaattgtacagcgctacggagtaagctggattgaatgcaattatgcatgtgtcggaaaggcacgggacttaggtatccgccaacttattcaaaacggcgcaacttggctggcttgtacagatgctgatagtgtggtcagccctgactggttacgctgccagattttgcatcaacctacagatgcaatttgtggcattgtgactttagatgaccttagccgtttatcggttatgaaacaaaaaaatatttatcgcattatcaggattgtatggatcatcaccatattcatggcgcaaatttaagttttagtgctgctgcttatatgcaagtaggcggttttgaacctgttccttgccatgaagatgtttcgctcattcaaaaactgataaggcagtgctgtaatattacatggagcaatttagttcgggtaactaccagtagtcgactcgaaggaagagcgccagaaggcttatcaaaatttttagaaaatctttaattaaacttattttcttaagattattttaataattgaaatatattctaaactcagatcctctgttatacatagtgttttagtgttcattgagctatacctttttgccacatcacccgatgtggttttttttcattatgaccatacaaacatctaggccaacgaaaagaccttctcaacaatagtgctgtatatctgacacgatgacacaaaaaatcacaaaagctaaaactcacggttttcataaattgtttagatagctatagataaaataacgaggagaatattcatgaaaaaaatattatttaccacactcactggacttgttttattaactagtagtacagcatttgcaagaacagattccgctttacttaatcaagcagcaaaaaatgtagtcactgtttcaaaagctaaaactttagctgatgaaacaggggtaaccttaactggtactatcgttaagcatattgctggcgaccattatgaatttaaagacaaaacaggttcaatcatgattgatgtcgatgatgatttggcaaatggttggcagttaaaggttggagataaagtgcgtattgtaggtgaggttgatacccaccgcgttaaaccgactgaaattgaagtgttacaaattgaacgtgttaaataatttttcattttaaataaaaagctcgaactagattcgggcttttttattgaaataagcaagcttataaattttttataataatgaaatataaagtattttaaataaaggtatgttaagttgaaaattccattaataatgaaattttatatttcacggaagtcttatgaacgttcgcctgtgttatgccagccaacgaaatgaaaaaaatgaagatttgctacaagatttacgtgatattctgacagaagctcgtgatttcaacgatttaaacgggatttgtggggtgctttattatgccgataatgcattttttcaatgtctagaaggcgaacaagaggtcgttgaaagattatttgaaaaaattcaaaaagatcaaaggcattataatattaaatggttatgcacatactccattgatgaacactcttttcagcgttggtcaatgaaatacgtgcagcgtaatacaaatattgaaactttctttcttaacatgggagaaaatacctttaacccgcttttgctgaaccagcaaaacctcaaatttttcttaaatgaactcttaattgcagagcaaactaagatgaatacggttaaaaaagttggaatggtgaatcggggagtaaacccgttctagctattagatgcgataccgatatggatgtgtttgagttcaggtacgatttgtgtcatgactaaatagacaattactgaaatcgacagcatccatatcacttctaaactttgactaatcacaaacattgcccagtaaaaaaagctaaaaagggcaatacacagtccgcttcctttgtagtaccaagtaataaatattccaaagagcgctgaagaaatgatgagatttagtgtctgattcattcctagatagttaaaaagaataattagtaagcataaagctaacattgatagtaaatatacaaatatattttttgcaataaacattctttatatcctatctgaagatttaaaaagtaatctttcctctgtttccagaggaaagatagtacatattcattttttgagattctttttctattattgagactttttatattaataaagatgactttatcattttctccagatctctttattaatattcagctttctatttaatagtaaagagtgcttatatgtactgaaattaattataggaaaaacaatcaattatgttgtaagctttagcttacataattgtgagacattgcctacatttgtataaaaaataacctaattttacaaagttatatgaataaaactttatattttacatatgtttatttaaaattattgttggggtggtctttacataaataacaaaaagtaacatcggattttcaatcattatttttaaataaaacttgatgaattaaaaatattattattaaaaatttagttaatatgagtttttataatttgtataatgaaaagtaataatttaaagatataaatttaaaatatgtttgttaaaaatagatttccttatctattttgattaggtttgggtgatcaaaatctaggcaacatgggccaccagactgaggctagtaatataatagccattattttgttaaaaatatttatatgttttggttttgaaagaagccgagtacttagtctgcctactaaggcccataggtagagacaaggaaatgctataagtaaaaaaatgcaggataaaattgagacatttatcaagatatcttgtccctgttttgtatagacgctaataactgcaaaagccatcatccatgttttaggattaatcgcttgcattaaaaaagcagctttaaaaccaataggagggtattgttcatttttttctaaagagataacaggattgtagttatatagtttccaagctagaacggtaagccagattaaaccactccatgtcataattttttgaataacagggtaagcaagaatagtggagccaaggccaataccaaccactaatacaagtaaggctgctccaatacaagaacctaaaataacgggaagtgttttagaaattttataatgactacttaaacttaaaattataaagttggtcgggcctggagtaattgaggcaacaattgcaaataatgaaaatgcagtgaggttttccatcttgtctaccttagttaattgggagagacaagatgaaataattaagatttttaatcttgaagatttgtgcagatttttctgtaagcggctggtgttagttcataacagcgtttaaaccaacgacttaaatgactttggtctgaaaaacataaatcagaagcaacttgtgctggagaaatacttctagcgagtaaatcacgtgctcgagtaagcctaagttgaataagatattgatgaggagctaaatgaaaagtggatttaaaaatacggtgaatatggtaacggtctagtcccaccatacgtgatatatcttttaacccaatatcttcaaataaatgatcatgcagaatatctcggatttgatgggcgatttggggtacatgaatacacgaagattgagaagctttttttaaccatttaccttgggcaatatattgaataagcacatctagactattgtctttcacaatattcatttctttatagtgtaagtgtcgaaatgcttgtgaagtaatgattgcgagttgatcatcggattttaatggcgcatcaatcactagttcgtaatgatcggggctgttgtgaaacaaaccttgaaggcgttgctttaaccattctggatgtagataaagcatttggtaggtaaaaccatcagatgcaggcgcatgtccatcatgaatttcttctggctcaagcataaaaacttgcccagcatgactattgatttgctttttacggcaatgaaattgttgaataccagattcagttacaccaattaaataacttgaatgccaatggggatcataagcatggccagtaaaatgagcacggattgtttcgatacccgtattggtatcttttgaaatatccacccagttactactcataagcactgacctataaacttttaattttagcccctgaaacagtataaaagagataaaattagttctagaagatttgtgcaaaaactttaaaaatttagtgtgtattaaaaccagcctaaggtttaacaggctggtttttcattaacgtttgaattgattaatctgaacgcgtagccagccaattactcatttcaggccaaacagaggtcggagcttgactaccggacactacgcccatatggccgccgggcacagttttgaacgttttatcttggctactaattaaatccataagaggcttaacagcatcggcggtcacaataatgtcggtatcgccacctacagccaacactgaacaatcaatatcttttaaataagctgtaagttccccaaatttgattacacctgttgagagttcattatcaatccagaaacgtaaaataatgtcgcgcataacgccacccggataggccagcatattgtcgataaatgaactagaggtagcgtggtcgacaataaattctcggttatccagatttttaagaagttgccaataggtttttaaattgccaatggggtccgttaatttaaaaccgagtgtgttttgccatccatggatatgaaacacttcacttggtacatgttggcgaatacgaaaaggcgtatgcttacggacccactgtgcaggtttagtcagacttccatagagcttacccatataacctgctttatgtgtgtcgatcggggaagcaagaattatcagattcttaatatctttatctttaaataatgcggtatagcaaagtgaaagggcgccacctaaactccagccatgtaatgaaagctgttgttgtccactatgtatacggacttgctttaacatttcaggcataaagacttttacataggtgccaaaattgtatttggcttgattgcgagtaggtacaccccagtctattaaataaacctcgaagccttgatctaaaaaatagcgtatcaggctgcgggtaggaaacaaatcgtaaataagcatgttcacagctaaaggcggaacaatcactaacggcacacggtgtttggctgaagcttctgtctcatttctataatggcgaaggcttataatttcatgcttataaattacatcaaaaggtgtttttcctgacagggcaatttccgaccctctaaaaaacagatctgatgcattggagagcatgtgaggtattttctgaccagcacgctttttaagagatgttttaatcgactgtacctgtggaacattctgtcgaactttaagcaataaactcattgaatataaaacctataaagatgttgcccagagcaaataacgagctggtcttttgcggatattaaagggaataaaagatgagttcagtgacctaaaagacaggattttctgtttaagagatcaaagtgaagttatactaaattaatgatttctttacataagattttgaaatgattgataaattaaattatagggcatgattttgtataaaatatttaaaaatttaagctattcttaagaatagtaaaaatttattggtagggtaattttgtaaagtttatttgtgttttttttacatattaaaaaataaaatataattattttacaatccgttaggaatgtaatcagaaagtagtatatatggaatttgtttttaatggtttttatacactaatttcggcggtcatcgttctattgttgggtcgctttcttgtcaatcggattgattttttaaaacgttataatatccctgaaccagtagcaggtggtttggtcgctgcggtagtttctttacttgtccacactttttggggatacagtattgtttttagcagtgaattacaaaccagctttatgctcgtgttctttgcttcaattggtttaagtgccaattttatgaagcttaaagagggtggtactgctttagtcatcttcttaatttgtgtagcctcatttattgttgttcaaaatgctgtcggtatgagccttgcaaccttattgggtctagacccacttattggtttgattgcaggttcaattacattaaccggtggtcatggtacagcaggtgcgtggggtgaaattttagaaagccagcatggtattcagggtgctttagcgttaggtatggcaagtgctacgtttggcttgattattggtggtgtcattggtggtcctttagccaaattgctcattaatcgttatagccttgctcaagcaaaaaccaatgctgagattcagcagcgtgacacgcatgttgaacaaaattcagatgatcttgcaccgtttgaaaacccgcatcaagttcgtttaattactgccgacaatgcaattactacgcttggtatgtttgcagcatgtttagcatttgctgaatttatgactggcttcagtaagggaacttggtttgagttaccaactttcgtttgggcacttggtggcggtgtaatcttaagaaatattttagaaagcgtgttgaaggttgatatttttgaccgcgcgattgacgtttttggtaatgcgtctttatctctttatttagcaatggcattgctttcattaaagctttggcaacttgctgacttagcaggtccacttgtggttattttaggtgctcaaacactgactatggctttatatgcagcatttgtgactttccgtgtaatggggaaaaattacgatgcggcagtattggcagcaggtcactgtggtttcggtatgggggctacaccaaccgccgttgcaaatatgcaggcgattaccaatatgtatggcccatcgcataaagcattcttaattgttccgctttgtggtgcattctttgtcgacttgattaatgcaactgtgattcagcttatgttgaaatttattgcttaattaaaaaaagcccgtaagggcttttttatggggcattttatagccaacaacttaaaccgttaaatctgctgcacttagcatttcttggcccacaatcattttggcaaattgattggcaattcttcctgaacggttgccttgctgagttgcatattgaatagcttttaactgaatcgtttcccaagtttcgcgttgctgccatttgtattcatttagccagtattgaacagtttttaaatactcttgttggctaaagccatagaaattaatttgtaaaccaaatctgtccgctaaagaaatcttttgttcaatgctatcgcctgggcgtaattcgccattttccccgacatttagctctgtattatctttgttgtattcggccaccatatgctttcgatttgatgtcgcataaatgagtgtattgtctgaactagaggccagtgaaccatctaatacagtttttaaagttgcgtaacttgagtcgcctgcttcaaaggccaagtcatcacaaaagataataaaacgctcagtacggtcttgcagtaagttaataattttaggcaaatcttctaaatactttttctcaagttcaatcacccgaaggcctaagtggtgatattcatttaaacaggcttttacaatagacgacttgcctgtaccacgtgagcctgtcatgagtacattgtttgccaacaagccttttgcaaaggcttcagtatttagttttactttgttgagttggctgtcgatattgcaaagatgattaaaagaaatgagttgaggtttgcggatcgcgacgagcgaacctttattattttctctttcccatctaaaggcaatcgcctcatctaagacatctacagaaatttcttgggttttagaaattttttcgactgcttgagtaagcttttgaatttcaaaaataagatttgaaattgtctgacttaattccatgagctcaacctttaaaaatgcatgaaagagaaattgaacaattaaacataggatgatagtatcaccgtatgtttaagcttactagtaccaattttaatgattgagcaaattcaaaaaagatcactggtcgatgaagtgattcatgtcatacgtcagaatattaaaaatgacatttggaaagtagatgagaaaattccgactgaacctgagcttgttcaaggtttgggtgtgggccgaaacaccattcgtgaagcaattaaaattttagaatatttaggtgttttagaagtcaaacaggggctgggtacttttgtacgcacgaaaaatgacttttcaattgtgattaattcaattcatcattctgatttatatgaacacgtagaagtacgatgtttattagaaatcgaaattgctaaattagccgctagacattgcacgcctgaaaatatgcgcgatgttatagcgtgtttagaagatagagcagcaacaaatcaacaagatgttgctaacttcatgttaagtgataagaaactacatttggcaattgccaaggcgactcataataaagctttacaggcaacttatgagtatttcttaaactcaagctatcaatacaccttagagctagtgactaataaaaatttacctgacccaaaccagcaaatacatactgaacttgttcaagctattcaacacaagtctgagtcagaagccatgcgaattgcggagtctatgttggcgcccatattacgttcgctagattcaattaaagctgactttgtccaaaaccacctagatcaaatactatgagttttatgattgtttcgaacaactttgctgttccttactatttaaatgtgaggaaagaaaagggaatgacggcttattattgggcaactcaccaatctcagttagctctatttgactcttacgaattggcttatcgcttttactttccatctcgacatattttgattcgaagtgaaattaaagctttcgctcagtaatataataattgagtacaacaccaccatatattaaaaacataggagaactggctcctatgttttaaaatttatggttcactgactaatcttaatatattttttaacagtatacttcttaaaaattctttataactttcatctgtatttttgttcgaatgttgaactaaatatccattaagttgagtgattataataatcgctctttctttatattcttctgaagatattttattatgaatggggaggatgattttatagataagttcgagattatacttttgtatgattgacaaagcttcatatacatagggcaaatgatctgaaatagagaaaaactctttaaatgcatttgtgatgatcggttgctctatttcataaattatattagtgataatattcataaaccgaattaaaggtggttcatttgcattcaaattaattaaaatttcaatacgctgtatatagtcacaaattaatttattaagtaaagcttttaataaaatatctttattttgaaaataatgttgcaaagtacttaaactaatatttgattgagttgcaactcctctcatactaaatccggaataacctttagtaagaaaaactatttcagcatttcttaagatctgctttattctttcttgcccttttagagtggtaaaggacttctttatttgcatagtatcaaaggtatcaattttgatcattatccagcctgtaagtactatttaaaaaaagcattctaaaccatgaaattaaaaaaatataaataaaatatttaaattctattaaactaaaattaggtcgaacgacctatatttttttaatctaggtcattcgacctaattaatggttaaaaaatgggtcaaatgacttatttttatttctttaggtagggttaaaataggtcatgttacctattttaataaaaacaaataatacttgtttttgttgtgtgtataaataattgtatttgaataattatttaaaaagtatgatcgttaaaaagataatttctttttctaatttttagccattttaataaagtaggggtgggtatttaattgggagtttttgtaagattaaaaaaattgattttaaataactcaacatagtctttttgtaatatgtgtatacaagttaaataattgttattaaattgtgaagagaatcacacaatagtaaaaggtagtttgttttatatataaaacagattagccatattttatttgtcgagtttgattcattttgttctacaaatctaatcattatatatgtaggttatgaatatgaaaaacattcagaaatcacttcttgcagcattaatagttgctggttatgcggtaaatactcaagcagctgttactggacaggttgacgttaaattaaatatctcaacaggctgtactgtaggtggtagtcaaactgaaggaaatatgaacaagtttggtactttagattttggtaaaacttccggtacttggaacaacgtattaacagctgaagttgcttcagcagcaacaggtggcaatatttctgtgacttgtgatggaacagatcctgttgattttacagtcgcaattgacggtggtgaacgtacagaccgcactttaaaaaatactgcttctgctgatgtagttgcatataacgtttatcgcgatgctgcacgtacaaacctatatgttgtaaaccaaccacaacagttcactacagtaagtggccaagctactgctgtaccaattttcggtgcaattgctccaaacacaggtacaccaaaagcacaaggcgattataaagatactctattagtcactgtaaatttctaaatataaaaaagaaataattaattgagtagcaggtttgctcaaatatgagtagacctgttttaaatggggggaagatgatattcaatcgtggttcggcatttataatttcttattttttaatttctttattaaatgcgggtgaaattggagctaaattaactagtcaaattgaattattgccttcttgttctattaataataacgttgtagaaaataatgcagcaaatttaaattttggaactatagattttggtgaagctaccacaggttttaaaggggttttagaagccagtttagttaataatggtaattcaggttttaagattgagtgtgcaggtatttcgactgtaaaaataatatttggagcaggaaataatgatagtaatattccagcttcattttcacaaaattattatcatgctttaagtaatggtaaagattttattgcttataacttgctctatggtttaaataaacaagtcattaaagcaaatgaagcttttattcttaatgatatgaataataaaaagaatatcgatatttttggtcaagcagcccatgatggtagtcgtatatctaagggtgaatataaagatatagtaccaattacgattgagttttaagaaaaatgaaatacttatattttaaagcaatatttttgctatctgttagtcaatttatatatgcagcagatcctcagctcaattcaagttttaaagtacaagctaaaattgaaaatggctgttcaatagataatattgagcaaaacatggattttggtaaatactctgctttatcaaaaaataaagtaatgactaatgttattaatagcaaaggttcttggaatatccgttgtacggaaagtttacctgtaagtatttctatagatggtggtgaaaaccttcaaaataatacaagacgtatgaagaatagttcatcccctaattatttatcttacaaactgtataactctagcagtttatccaatgaatatattgtaggtaataaatatttattgcctgctacaacacctacaaaccgtctggcaaattttgaaatatatggtgtcgttgatttagaaaataataatgaaccccatgcggccggaatttataaagatactgtttcaataatgattacatggtgatttgtatgaacaattctgcatttattaaaaatggcattttaaaatcttttttatttgcaagtacattatcacttgttacacctgtgatggcacaagcaacttttctaatttggccgatttatccaaaaattgaagccaatgaaaaggcaactgcggtttggcttcaaaatacgggtaagaccgatgcaatggtgcaaattcgggtatttaaatggaatcaagatggcttaaaagataactatagtgagcaatcagaaattataccaagcccgcctgtagctaaaattaaagcaggcgagaagcatatgcttcgcttaaccaaaagcgccaatttgccggatggcaaagagcagtcatatcgtctgattgtagatgagttgccgatccgactttctgatggcaacgagcaagatgcttctaaagtaagtttccaaatgcgttactcaattccattgtttgcttatgggaaaggaattggcagtggattaaccgaagaaagtcaaaaaattaatgcaaaaaatgctttagcaaaaccggttttacagtggtcagttcgcaataatcaacaaggccagtctgagctatatcttaaaaataatggtcagaagtttgcgcgtctttcggcactgaaaacttcaaaaacaggtaatgatatctctttaggaaaggctgcttttggctatgttttatcaaatagcactgtaaagtttgctattgatcagtcaacggcacatgagttggcaaaaacatctaaaatttatggtgtggacagttctggtattaaacaagaattgatcgaaatcaccaaaatggaggatccatcatgatccttcggcataataatttatgcaaaagtattttgctgattttattgtcgggtggatgtttaaatattccaaatactgtgttcgcaggcgatttgcctccaccaccaagagacattaatgaaattaatcaactttttaaactgtatctcgatttggttgtgaaccaatattcggtccagcaagttgtgccagtgattgtgaaaaatgatgagtacttcatacaaaaaaagaagctgattgatgaattagaaattaagatccctcaagagttattaacaaacactgacacatctttatcgaatcaagatgttttgacattggggtttagtggtgacgcgagtgattggatatctttagataaattaaaagatgtaagttatgaatatcaatcttcgaaccaatactttaagctcaattttccgcccgcttggatgcccactcaagttttgggtaaagactcatggtataagccggaagtcgctcagtctggtatagggctgctcaataactatgatttttatacatatagaccctatcaaggcggttcaaccagtagtttatttactgagcagcgttttttctctccgttaggggtcattaaaaactctggtgtctatgtcaaaaaccattacaaaaatgaaggtaacgccgagtctgtagataatgatggctatcgtcgttatgacacatcttggcagtttgataaccaaaagaatgctacatcttttttactgggtgacattattaccggtagtaaaacgacatggggaagttctgttcgactaggcggttttcaggtacagagaaactattcaactcgaccggatttaattacctatccattgccacaatttattgggcaagctgcgttgccaagtacagtcgatttaattattaatgggcaaaagaccagctcaacagaagtacagtctgggccatttattttaaacaatgttccttttattaacggtaaaggggaagctgttgtggtcacgactgatgcagtcgggcgccaggtcacaacatcggtcccattttatatttctaatactttgctcaagcccggcttatttgattactcattgtctttagggaaaatccgtgaagactacggacttaagaatttttcttatggaaaatttgcaagtgcagccgatgcccgttatggggtaaatgactggctgactgtagaaggacgcaccgaactttcttcagatttacagttattgggtgctgggtctgtactcaagcttgcaaatttaggtgtgctgagtgcctcttttacccaaagtaaagccgacaaatctatgtctgaagatcgaacgaaagacttggaaggtaatcaatatacagttggatacagctataaccgtaatcggtttggttttagcattaaccataaccaacgtgatgatgaatataccgacctttcacggctgcaatatagcaatttaatttcagttaatagcaataaaagcctaacggccaatacttactttgccactaaaaactcaggaacttttggcgttggttatatcaataccaaggcgaatgacttcaaaaatcgctttttaaacttgtcttgggcgcctgttttaccgacttatatgaatggcgtgactgtttcattaagtgccaaccgtgatttcatcgaaaaagaatggagtgctgcatttcagctttcgataccgttgtttcagcgaaacgcgactgttaactcaggttatgcgtttaataagcagggcgatactggctaccttaacttcaaccgctctgttccgtctgaaggtggttttggtgtcgatttaacccgacgctttaatgaaaatagtgaagatttaaatcaggcacgcgtcaattaccgcaacagttatattaatactgactttggtctgtctggaaaccatgactataactactggtttggcctatccggatctctcatttatatggcaggagatttatttgcctcaaaccgattaggtgaatcttttgcattgatcgatacaaaccaagtgcctgatgttttggtcagatacgaaaacagtttaattggccgcagtaataaaaaaggccatatttttgtgccatcggtaacaccttattattcgggtaaatacagcgtcgacccaatcgacttaccttccaactttacaatcacacaagttgaacaacggatagcggctaaacgcggttcgggcgttgtgattaagttccctgttcatcagtctatttctgcaaatgtctatttgactcaggcagatggcaaacctgtgccggtagggtctgtagtacatagagctgatcaagagtcttcttatgtgggaatggatggcattgtctatttagaaaatttaaaaccgaataacaccgtaacggttcagcgttcggaccaaagtatttgtaaagcagatttttctgtagatgtagaacaagccaagcagcagattgtggtggttaaacctgttacttgtcacgaggtatctttgccatgaatataaaaacaaaaaaattactcagacatttatgtatgttttctggactgatgttgacgggaaatatggctcatgctgcatgtagtgtgagcgcttcaggtacatcttctatttcggtcccgtctatttacttaatggaaaatggtgaaaactcatcacaatttaattcgggtttgtcgtgtacaggttttagcttggctttagcaaacatgacctaccaaaaatatcgggttgagcaaatgtcaaattcatttaccaatgctcagaccggagaaaaacttaacgccattattttagacagtaacaatgaaatcattagtttaggccaagaaaaagacatgagtagctttacgctggtcaatctttttagcgggcctgatggcaatttacctttctacatacggcttccggctgggcaaagtgtatcgccgggtgtttatcaagccgactcgccgttaaaagtaaaatggttctattctgtacccgcagttgcgattgtgggaatcggggtgttctttgagagtcctgggtttagacgcggtgcattgggtattggttttaactggggaagtggggcagactcgcttggttcactctcaattactgtactgccagactgccgaattttagctcaagacgtaaactttggtacggcggcgtttgcttccaagcttgaacctgttcagtcgtctatgggaatacgttgctctgtaaatacaccatattatgtgagtttaaataatggactttccccgcaaaatggcaaccagcgagctatgaagtcacaaacgggaaatacatttttaaaatacgatattttcaagaattcatcgaatgaccgatggggaagcggtaacgagcgttggtcgagtttaaatgcaacgattaacccgggtgtacataacggggtaactcagcagaactatgtgtttactacaaaaattgttgatgaaaacgcagatacagtaccagcgggaacttatcaagatacggtcacggtacaagtcgagttttaaaagctgttttatagaggagataaaagctcagttcatgggcttttatctttaaccaaactattcaatttctaactgatcatcatctttggtaattttaatttttatttttttatatttccgcttatttggatcgagcgccgagtttattacttcatcggcaaaaggcgggcactgcatgagttttgcataagctctatagccgatgcgtattcgattaggcgggcaatcggttctttttgaatagtattcaatgagtgagttcagttcttgtaataaagtttgctgttccatcatacatacttaacaattagataactcaagcataatagatttaaaccttttgctgtgtagctgtttatcataagcacccatcaaaattgtgatggagttctctaaaataacttataaatgtattaagtttgttttggggtaggctgaggtgtttttttaattgaactgtcacaatggaaagctaagttagacctataacaaaaagaatgaagattgttgcgaacaataaaaccaagaagcaattttcaactaaagctggtctgctgtaattaagctaattcgaaagaattggcttttttatttattaaatattattccaatagatttactaagttaattatttctttactatcaaattgaatgaaaaatatattaaaagaatagcgacatttaagtcgctactcttataaaaaacgttgctttactcatgctatatcagggtgtttatcagcaagtttttgacgtttttgttgaagctcctgaattttctgatcaatattttcaattttctgttcaatagtttcatgaaactcttcaagtaactcttgtgcttcctctatattgtgagcaataggcacgcccccaattaaaggcttattggctgtttcctttaaatacattgcagtagcaatacctaccaccccgcaaatcatcaagtaataggctggaaccatcagattatgggtagtttcaaccagcgttgcggtaagagttggggttaaaccagcgataactactgagaaattaaaggcaatacctaaagcgctataacggatttcagttggaaatagggcaggtaaagttgatgccatcactccgatagacatattgagagataaagcaagaataagtaagcctataaaaatttgataatttactccagagttaagtaatacaaaggccggataggacaagaaaataagagaaaagcttccaataaaaataaatgggcgacgtccgaacttatcactcaaataaccaatcacaggttgtacaaatagcatgccaaccataaccgcaatgataataagtgcaccatgtgcttctgaatagcctaagttatgcgaaaaatagcttggtaaataagttagcaacatgtagtaagtaacgttagtgctgattactagaccaatgcacaccaataaactacgcttatgtttaacaaaaatttctttgaaactaaatttttggggtttacttttttgtgcttgttgctctgaatgctgttgatatacaggggtttcttcaaggcggtttcgtaaatataaaccgattatgcccagtggtagagcgagaaagaagggaatacgccaaccccactcggcaaagcgtgcctcacccacggcgtgtgtgatcaaggcgacagttgcagccccaagtacaaagccggctatcgatccaaaatcaagccagcttcccataaaaccacgttttcggtccggagaatattcagctacaaaaatcgcagcacctgagtattcaccaccaatggagaagccttgtacaatttttacgatgagtaaaagaataggtgcccataaaccgattgtttcataagatggaataaggccaataccaaaggtactgatggacataataatgacagtaatggccagaactttttgacgtccgtatttgtcacctaaatgtccaaagaaaagaccacctaatggacggaaaataaaaggtactgaaaatgtagcaagcgcggcaatcatttgcacgcttggtgaagtatctgggaaaaatactttaccgagaacgtatgccacataaccataaactccgaaatcaaaccattcaattgcattacctaatgcagctgcagtaatcgcttttttggttttttcgttctcgatgatattgatatcatcaatctcaataggttttacttgtttttcagatgtgcgcatatctagcctaagaattgaatctcagtatttaaagtgaaaatatacggttttaaatactgaattaaaaaattgcagaataaagagacagaataacgataagttactcaagaaaagggaattaagaggtgttctcttaatgatcaacaagatagcaaaagagaactaattatttgtttatgttagagttttaaattgtggagaaattgtatggataaagttacataagtttacttagtggtaaaactgaatcaagggttaaaaaaattatataaaaattgataaaagacatgagattagcataaaagttaagcgctattttttgagcttaaaaggccaagtttttttacttttaatatacaaaaactgaacttgccttatatcaggttttcattaatcaaacttcgttgcttcagggattgactctaaataatcaaaaaattgttgaatctgttcttcagttacacgtgctgtagaaatcggggccaattcatctctacccaagaaaccgatatctacctatgtaacgttgataagtattttatacaccccaatttaacaataaattttaattatttatccttactttttaatgatctattttaaaacaaatgtcattttgtgtgcttgactgtaatagggcagagcactatccttgcctgctggcctacattgccagccggctttgacaggctgatttagaccgcatcagagttatttcttctgaggaatagttctgtgtgtaagcttctcgtctcctcccgtagcggtaggacgggagagggacaccttcgggtgtgctggcgtctaaccagtctgtcaaccttctctcgttctgccaccataatcatttgacagtgattcggtagagcttctttagacatgaggagttttctatgcgtactatttcttatttattggcctttgccaaattctctctatttataccgcctaaacagtcattaaaacggctcaatagaccgtaggttttctacgccttaagcatcgttacgactcaaaatcatagcaacaataaacccgagataggcgagcacaccattttgtgcggttttcgcatgcctgtatttagcactcattttaagagtgacggcatttttatctctttttacatacaacaaaaaattattttaagcggtatacatgaaaaatttaggcacttcatttagagcattacacgtgctctacatagcatcggatttatttaaacaatacgggtttcataaggttggggtagaccgaattattagcgaaactaaaatttccaaagctactttttataactactttcattcaaaagaacgtctgattgaaatgtgcctcttacttcaaaaagacacattaatggaaaaagtaagagtggagatagaaacgactcactattcaactttcgctcataaactcaggcaaatctatcacttacatgccaatttaaagagcgcttattatctgttgtttaaagcaatttttgaaattaaaacgagttatcctacagcttaccaaacggcaatacgctatagacgatggattaaaaacgaaattttctgcctgcttatggaaactaaaaaagccgtttcatatgccgaagcggaaatttttatatttatgatagatggggcaattttaggacttttgacttcagacagagccgaagaacaaaccaagttgttagattactttttagtgagggttaactaaatttattgaactaaagaatcagtattttagaatgaattaactatctttttattttgaaataatgatttcttaattaaaaattaacatgattaatcttttattttattgttctagattttaaaaaggacaagttatttagactgaaaactcaccaaatactaagaaagagtgagtttataaaatctgaaataaaaatagatgaagacttaacaatataaatttttggagatattcgtggatgatcatcatttaaaaagaaaagtcggcacgcttgaaatggtcgtagccatgctgctttcagggagtattggtctatttgtgattaagtcaggtcaatcacccgttaatattgtatttttccgttgccttatttcagcattgtgtttaataccgatttgttacttttatggtcattttaaaaaagtatacttcggtaaaaaagaactgtttttaatggtgacttcgggccttctaattatttttaactgggttctactgtttgctgcttttcctaaaacttctatttctttagcgacgattgtttatcacgtgaacccgtttgtcattttatttttaggggcgttggcctttcacgaaaagctcaataagaatgatgtgctatggaccatcgttgcttttgtagggctaatcgtgattataggcttaggcagtgcttcggtgaactctaatgagttggtcggcttggggctggttcttattgccacaacactttattccatatcggtattaatcactaaaaaattaagtaatacaccgccgttattaattgtatttatacaaaccctgagcggggccattgccatgactccatttatgtcggtttttgaaaacccgccgatcggtcaacaatggctgtttgtggtcggattgggagttttgcataccgcatttctctactatttaatgtattcggcgattaagaaaatacctttaaataatattgcgatcttatcttttatttatccaatatcgaccatagtgattgattatttcttctttgatcatgtgttgactagtactcaagttttaggtgcaggtttaattttattaggcgtattgggtgtgaagttgcattggaatatttttgcagtaaaaaaagtaggaataaggaattaagatataaaaataaaaggtgaggttgttaaagcctcaccttagttataattttattttatctttttcgcttttgtgtattcggcataagcttcatctgcaaagcgtcgtaaagattcaccaattgcggcatattgatattcattaaggttagctaaagatgcacgagcagaagggtgctgcacaccgaagccagaaccgggtaataaaaccacacctgtttcatcagctactctaaataatagctcggttgggtttttatttttcatgacccaatcggcaaactcatctccatagagagttcgtgaagtgttttcgaggttgactagggtgtagtagtccacagcatttggatctgttgggacatcgacaccaagctgtctataaagtgctgcatcacgttcacgaacaacagatttgactgcttttttatagctttggcgtgagtccatcatattaaatagcgcaaataaaaccatttgaacttgctgtggggtagacagaccagcggtatggttcaaagcaacatttcggctatcggcaactaagcggtcaataaacttaatgcttgctgggtcggtggttaaagatgaatagcggtcttccagctctttcttctcttttttcgataagttcgcaatttgtttatcaagcacattgttatttgaaagtgcaatgacaccaagtcgccaaccagtcgcaccaaagtatttagaaaatgaataaaccaagatcgtgttgtcaggacagatcgcaaatagtgatttgaagttatcggcaaaagtaccataaacgtcatctgtcaaaatgatcaggtcggggcgttttttaacaatatctgccaaaatcgcaaggccttcatcactcattttcactgatggcggattactagggttcactaagaagaacgctttaatagacggatcttctaactttctaagttctgactctggatattgccagccgagtttagggtctgcctcaataagtacttcttcaagctggtagtcattaagttttggaatttccagatatggcgtgaaaatagggctaccaatggcaatacggtcgccgtttttaataattttattttcttttaatgagttaaaaatataggccattgcagctgttccgccttcaacagcaaacaaatctaaatcacttttttgcatgccttgtacgcccatttctcgtaagacatactctttaataatcgtttcacttactctgagcatacgatctggaactggatagttacagcctaaaattccttcaaccatttcaagcagaaaaagatctgggtctaaacctaactggtcgcgtacataagaaacagctttgcctaaaaagacgatgccgggtttgtcacggttttccaaaatgaaattatcaaaacgtgactggagaccaacggggcgcgggaagccacctaaaccttcaggcatataggaaaatgaaaactcggattcagtcgcagaaaacaaacccagttgaaagaatgctctacgtgggatagtggcaagaaagttcggattaccacgcccagcatttaacatcattcggtcagttttgctttgagctaattctattaaattatctttaagttcaaatgggctgagttttgcgtatttagaataatcgactttccccatgggacgtctccttaattatagtgagatgaataaaatttctaattcaatgtagaaaatcaggccaagcctacaatcagtggtccgagtaaggttaagaacacatttgctagggcataggtaattgcaaatggaacagtcggaatcgagttgcctgctttgtctaagattgccccaaatgcagggtttgcactgcgtgaacctgataatgcaccagccatcactgcaacgttgtcataacgcagaacataacgagcaaagagcatggaaagtaggagaggaaccagtgtgaccaccaccccaatcataaagagtgaaagaccactttctttaatggtttgaatagcctgtaaacctgattgtaaaccgacggctgcaacgaagcctgcaagccctaaatctttaagaagctgggaagctgctaaaggcatattgccatgcacctgatttcgacttcgaatccaaccaaacagaagacctgatagtaaagcaccaccaccagcgccaagtgttaggggcacatcacctagacgaatcacaaaaagaccaatcactaaaccaaccacaaggccagcaccatgaaaaatccagtctgtttttaagctttcaggcagggctttaccagcctctttcaccaagcggtcgaggtcactttttgtaccgtagacggtgactacatcaccttggcgtaaaacggtgtcgttacttaaaggttgggactcatcgttacgcttaatcgcaagtacataaataccgtgctttaaatacgcaggcgtattggccttaatatctcctaaagtacgattgagatatttggaatttcttaggatgacatcgctggtatccataatcatttccataccttgcgatgactgtaattcgctaccgatttgctcggcaaccgaaacaacactggcacggcgaccaaccagtaaaatgacatcgtctgtttgtaaagttagttcaggagcaacatcaataaactgatctttacgttttaaccgttcaatcgtaatactcggctcttttgcttcaatttccgcaatagtttgcccattggcttgtttaactttataaatacggccaacaatttccggcattgcgagttcttggcccggtgcgagttcaaaagcacctttgagtcgttcactctgagcttttaatgcatcgtcgtgaatttctttacccataaatttaggcaagatattcacacagacaataattgctcccaatgaaccaaaaatgtaagtcactgcatagccaatcgcgacatttgcttgaagtctttgaatttctgcgagtgggagatcaagtctagaaattgcgtctcccgcagtcccaataatggctgattgagtcatgccgcccgcagcgagacctgcagccaagcctttatcgagatgaaaaattttagccatcactaaaacagtaactaaaccacacactgccataaatactgctaaaagaatttcttttatggactgtggtccaagtgatttaaaaaactgtggaccactttcaaagcctactgcgtaaatgaagagagcaaataaaattgctttaacgccgttatcgacaggcacaccaataagacttaaaacaactgcgacgagtaaggagcctgcaactccaccaaactgaaactttccgaactggaattgtccaatccagaaacctattgcgagtgataagaacaataatatttcggggctgtgctttaaaacaccttgtaaccattcaatcattttgatctcacttttattattagctctatctttaatatataaatttatttatttttcatttttaaaaatacattatcaaaattacttaagcaaaccttcaatcctggtgattttcttaagtttaaatatcaaaaataatacttttaaaatacttgtgatcaatacataccagtaattctgactgattaaatcaacttatatttttttaatggatggtaaaatttatttacaataatataaagaatattttatgaaattaaagaatcttacttataaattagcttgaaaaatcattttttaatatattgatttataatgactagttattaagtgtcatactggtcttaattttgtataaattaaaaaaaatttacttaaaattatttttttgataattgtgtcgcataaattaatttttaatatatttgaattaattttcataaatatatttgtttcaagggggagtataagatttaaaattgctatttttgaatggactatatatttggatgcaaaaatgattaatattttggttttatattttgattaaatttattgtattgaaaaataggggtttagggctattaaaaaattgaatttgctctattggcgctcttatttttaagtgatttcctgtccgctttatgacccacacgctattttttcttattcttttttcaaacactcacatgccatactgcttaggagtgctaaattttgatggatttatgctgtcacatgctgatcttagatattttggccataaaactgtgttatctcagcttaagcctttaaatttgggcctctattttcaattccaccacacaatctgtacatattattcagcagtttcaacgatatattgaacagcacctacggtaatttttattctaaaatttccattatctgatatagcttttagattgatttatattttaatttatcttagtaataaaaagagttttgtggcacagtaaaacgataaatcttagagtataactatgaagcttaaagaattagcaggttgtgaggagtgcgataccgtctatcgtagagtcccgcttgcttacggaaaaagagcttattgtgtctgctgtggtgcagagctttatcggcataccaagccttttactacattgttagctctaattttaacggccctcattgtatttgttattgccaatagctttcccattgtcaaaattgaactgcaaggcaacatatccgaaaccactttactgggcgccgtgtgggtaatgtttcattacgatagggcatttgtcggtgttcttattttaattactacattcattgtgccacttacgtatttgttattgctgggctatgtactcggtacggtcagtatattaaagaaatgcccccaatttttagtcggtgccttgcgaacactttattttatgagagtgtggggaatggttgaggtgttcctgatcggaattctggtcacgcttgtaaaactaatgggcatggttcttgttattccggaaattgctctatgggcatttgcggtcttgagcctattaatggtttatattacttccgtaaaggtgagtgatatatggaatgaaattgataggtcacagccatggcaaaaataaaaaatgtgactcctgaaaaaatcacaaataccaatatgattttaaaacaatatccaagagccaaagatctttcactgatattgtgtcattgttgtgggttattgaattcttcaaaagtaaataaaactgatgctcataaaaatcaaattctacgttgtgttagatgccatagcgttttgcacgagcgtaagccgggaagtttaaatcgtacctttgctttagtggtggctgcgaccattctctatattcctgcaaatgtccttcctatgacggtaactgactctcttttgggccgtcagcaagataccatcatgagtggggtcatttacttttggcaaagtggagactatttagtatcggtggtcatttttatggcgagtatttttattccgatgctaaagcttcttattttgtatttcctgttgttggttgtatatatacagtcatctgcggcgtggaagtttgcaccggagcaatgcattaaactctaccgcattgttgagtttgtagggcgctggtccatgattgatgtgtttgtggtagccttacttactgctctcattcaaattcaatcacttgcaactattttagcgggaccgggttcaattgcttttggtgcggttgtggttttaaccatgtttgcatctttaagttttgacccacgtattatttgggataatttttatgcatctcaaaatacaaataaacctaaccgtgtttcttcggaaaaaaacacaattattcaggctgaacactcgcctttgaataatgattccattaatcccagtcaataaaagaacaatgagtatgtctgaaaacaaaacaaccagtgagacctcagatcatcatgaaacagatgttgaactggaaaacatgaatgatttaccagaaccccaagaaaagaaaaatcggtggaagcctctactaatctggattattccacttattgcgctgctgattgcgctttctttggcggtgaaagcactactttctaatggaccaaccattgaagtatcttttcgtaccgccgaaggtttagtcgcaggtaaaacaacagtacgctataagcaggtagacattggggtggtacggcaaatcgatcttgcagaagaccgatctcatattattgcgcgcattgatttacgtaaggatgcaagcaattttgctgctcaagattcacggttctgggtagtgcgtccacggattgggacaagtggggtttcaggcatcgacactttattgtcgggttcatatattgaagtagatggcgggaaatcacccgagaaaaaacttgaattcacaggtctggaaataccgccagtgattacgtccgatgtgccgggcaaagagtttttcttgaaagccgatgatttgggatctttagatattggttcgccaatttattaccggagaattaacgtaggacaaattacagcttataagctatctgatgacggtaaaagcgtagaacttcagacgtttattcgtgcgccgtacgataaatttgtaacgactgacacacgtttctggcaggcaagtggtattgatgtgacgttaaatgcttcaggctttaacttagatactcaatcgcttgcaagtattgttgctggtggtattgcgtttggtttccctgaaaactcaaatgcgactgtcgctgctaacaagagccgttttaatctttgggactcaaaagctgaagcattaaaagagccggatggtctaccgcgtggcgtgattatgtattttgatcactcattacgtggtttggctgtgggtgcgccaatcgacttcatgggaattgaaattggtagcattaaatcaattaatgcagagttttataacaactataagcagattcgcatgcgtgttgaggcagtgatttatccttcgcgtgttgaaaacggccaagcactcaatccaaacagcgacattttcaaagattttgttgagcatggatggcgtgcccaaatgagaactggcaacctcttaacgggtcaaaactatattgctttagataagttccctaaagcaaaacctgccactctacaaatcttgaatgatggccgtgtggtaattccaaccactgcaacagagttaagtggtttacaggcacaggtttcccaaattgctgataagttaacaaaattcccactagtcgaaattgggcaggatgttcgcaaaacgcttaagaatatgaatacagccattgagtctaccgacaagctggttaaacagttagatggtaaagttgctcctggtttacaagcaaccttagacgatgttcgtaaaactgtaagatcttccgagtctattttgtcgagcgatgcgccgttacaacaagacgtacgtaaagcactgcaacaaatgactcgtgcggctgcgtcattacagttaatggcagactatattgaacaacatcctgaatctattattcgtggtaagagaccagaggccaacgatgaaaaataaaaagaaccgatcattgcaacactctaaagtagccaaatggctgcttgggagtggagtgcttttgacagcgatagccatgacagcatgttctagttcaccaacaccaaactattatacgcttacacctaaagtgactccggtctcgaactcaactgtgcaggtgattgaggtcttgccggtcgggatcccagatcgtttagaccgtgcaccattggtgctacaagagagtaatggtaagtcgactgtacttgataatgagcgctggacatcgactttgggtacacaattacgcgataccttatcggcgggtttgcagcaaaaattaggagcaattgacagttatagcagtgggctttctggaaacaatcagcctctatatcgagtttctactgacttttctcattttgatattgtagataatagcaatatcaacgttgccgtatcttgggtagtgaagcgccaaataccgcccactcaactagagtcaacgaatccgaaagtaatctcgaatagaggagcgcagctcaattgtagaattgcgtttaaacagccgattgatcaaaaagctaaaaaaatggaagcaattgtaagtgcttcaaatgaagcgatgagccaaattattaataccatctcttcttcaattgtggcgctagattcaaataaaaagatgaacatcaataacggtatatgttcatcttaataaaggcttatttgttatacgtttaatttaaagctccttatggttaaggagcttttttatttacttttattggtaaaaattaaagatcttttaaaacagttataaatttaatcaagagagcaattttattctagctgtctatttatctaagaagatatagataagctttagattcggtaaaaggtttaaataatgaaaacaatcgggttactcggcggcatgagctgggagtctacagcactttactatcaacaaattaatagaatggttcagaacaagttagggaaactacattcagccaaaatcattctaaatagtgtcgattttgaagaaatagcagcattacaatcgaaaggtttatggcaagaagctggagcctacttagctgagcaagcacaaaatttagaaaaagcaggggcagactgtattttagtctgtactaataccatgcataaggtagcacctcaaattgaagatgccattacggttccatttatacatattgctgatgccacagcaaaagaaattttaagtcaaaatatccgaaaagttgcactgttgggaaccgctttcaccatggagcaagacttttataaagccagattacaagatcttggaattgaggtgattattccaaatgatgcaaatcggaaaatagtacatagcattatctatgacgagctttgtttaggtgtgatcaaccccgattcgcaacataaatacacgaccattgttgaagagttgattgggcagggtgccgagggcattattttggggtgtaccgaaatttgtatgttgattggtgatatcaaattttctgtgcctctatttgataccaccaccattcatgcgaaagaagctgtaaattttgcattagagcaaaaaacggcagcccgttctattgctgctggttcggtataaatactcatcagcttttaatttattctgaaatacgaacgaatcacagcccaatttgttgaaagccagcagatcagtgaacccgccgtgaccatggctgtaccttgccaaaaactgattgataactctgtctgtaaaaccagcatggcaagtaaagatgaaatgatgggggtaaaataagaagcaaccactagcatggtaatgttgccatgaataatgccaatattccatgctgcataaccgagaccaattgcagcagaagcaacgattaaagataaaattgtatttaaatcgagtgaaggcaaactcacttggccgctaaaaagcaattttagccataaggttagggcaacaccaagaaagaaaatagaaatagggttttgtcctttacccattttcttggtcaacacacagtaaaaagcccaaataatggcacctataaaggccaaaatataacttaaaggattactatgaaaattatcgacaacacgacctaaactaaaatctccgttcccggtctgaataaaaatgataccggaaattgaaatgagtaatcctaaaataataaacacattaaattttaactctctaaaaataacaaaagctaaaacagtcaggcttggccaaaggtagtttacaatacttacttcaatcgcttgttgcgccgtctttgaataggcaagtgcaaacgaaaagcaaagctcataagcaataaataaaattgcccctaaaatcaaatattttttagaaattaatttaaaatttggcaccctaaaaataatgagcaggagtaaagcacttaaggaatagattagcgtaatgccaacatctggaccgattgcagtcgtaatatgttttacaaaacccaccatagaggcccacattaggatggcacttaaaccaatcaaggttgctaaattttttgacataagaaataaatgaacttaattgaacacctgagctacagtgaaagttaaaaataattaaagtaagtcagggtaaaggaatttttaattaaaaaataggcacaataaaccaaattacctaataagtattatcagccaacataaatacttttggtaattaaactaaatgccaagtattaatttatagctaagcattagagtaagctaaacctctagaaaacacccagttatgtattaaaattttaaaaatatagacggtaatgctcagtacagttaaataaatcaactataagtctctcttctaaagcattaccctgtgtttattgcgaaaaaataataaatggagataaaagatgcttacacgttttttactgccgattttgggcactaccgttttagttacaggctgtgcttcttcctctcaatatccgattaacgagagttatggtcctgagccaaagttacctgaaccgaaaacaagcttatttccaaccgtaaatatagcaccggcacaaggttggccaagtggtgtgatgccgactccggcagaaggtttaaaagtaaaagcatttgctaaaggacttgagcacccacgttggctctatgtattaccaaatggtgatgtgctggtggctgaaacggatgctccgcctaaacctgaagacagcaaagggattaaaggcaaaattatgaccttcgtaatgagacgggcaggatcatctcatccaagtgcaaaccgaattagtttactccgtgatacgaatggcgatggtatagctgaccaaaaaacggtattccttaaaaacctaaactcaccgtttggtatggcactggtaggaaatcatttatacgttgccaatacggattcactcatgcgttttccttaccaagaaggtgaaactcatattacttcaaccggtactaaagtattggacttaccgggtgggcctctaaaccaccattggaccaaaaatgttattgccaatcgtgaaggtacaaagctctacattaccgttggttccaatagtaatgtggccgaaaatggtctagatcaagaaaaaggccgtgcacaaattatggagtttgatattgcaagtggtcagtcacgtccatttgcaacaggactgcgtaatccaaatggtatggcttggcagcctcaaagtggaaaactttggacagttgtaaatgagcgcgatgaaattggtagtgatttagtgcccgactatatgacgtcggtacaagatggcgctttttatggctggccttatagttactatggtcaacacgtagatgtacgaatcaaaccacaaaatcctgacatggtggctcgtgcaattaaaccagactatgctctaggtaaccacactgcttcgttaggtcttgcattttatacagccgaactcatgccacaatttagaggcggagcatttattggacagcatggttcttggaaccgtaaaccacatagtggatataaagtcatttttgtgccatttagaagtggtcagccctctggtccaccgcaagatattttgacaggatttttaagtgaaaaagggaaagcgtatgggcgtcctgtcggggtagcaattgatttttcgggtgcagtattagtcgcagatgatgttggtaatacgatttggcgtgtctcaccagttgctgaaacaacttatgagagtccaacccagcaatccattcgtagttcagtgactcaaccttaaaaaggttgggcaaaataggtttattttatgcaaatattacggttatctgattaccctcaatacaaagaaatggctgcacagtggttttctgaaaaatggcaaatccctgtggaagcctatcttgagagtattcagatttccattgatcaaaagcatgctattccacagtggtacattgttttaaataaagataagtatttaattgctggagcaggagttattgataatgacttccatgagcgtaaagatttaacaccaaacttatgtgctttatttgtagaagagaactatcgaaaccaaaatattgcaaaacagattttagattttgtacgtgaagacttgagtaatcagggcatccaaacactttatttaataacagaccataccgagttttatgaaaaatgtggttggcggtttttaacgttggtaaaggatgagggcactgttgcaaatagtcggtggtgataaacttatcatccccttttgctgatggagctgcacatgaacccattcaaaggccggcattttcagcgtgacatcattctgtgggccgtacgctggtactgcaaatacggcatcagttaccgtgagctgcaggagatgctggctgaacgcggagtgaatgtcgatcactccacgatttaccgctgggttcagcgttatgcgcctgaaatggaaaaacggctgcgctggtactggcgtaacccttccgatctttgcccgtggcacatggatgaaacctacgtgaaggtcaatggccgctgggcgtatctgtaccgggccgtcgacagccggggccgcactgtcgatttttatctctcctcccgtcgtaacagcaaagctgcataccggtttctgggtaaaatcctcaacaacgtgaagaagtggcagatcccacgattcatcaacacggataaagcgcccgcctatggtcgcgcgcttgctctgctcaaacgcgaaggccggtgcccgtctgacgttgaacaccgacagattaagtaccggaacaacgtgattgaatgcgatcatggcaaactgaaacggataatcaacgccacgctgggatttaaatccatgaagacggcttacgccaccatcaaaggtattgaggtgatgcgtgcactacgcaaaggccaggcctcagcattttattatggtgatcccctgggcgaaatgcgcctggtaagcagagtttttgaaatgtaaggcctttgaataagacaaaaggctgcctcatcgctaactttgcaacagtgccttctacggcacgtttgaaggcgcgctgaaaggtctggtcatacatgtgatggcgacgcacgacaccgctccgtggatcggtcgaatgcgtgtgctgcgcaaaaacccagaaccacggccaggaatgcccggcgcgcggatacttccgctcaagggcgtcgggaagcgcaacgccgctgcggccctcggcctggtccttcagccaccatgcccgtgcacgcgacagctgctcgcgcaggctgggtgccaagctctcgggtaacatcaaggcccgatccttggagcccttgccctcccgcacgatgatcgtgccgtgatcgaaatccagatccttgacccgcagttgcaaaccctcactgatccgcatgcccgttccatacagaagctgggcgaacaaacgatgctcgccttccagaaaaccgaggatgcgaaccacttcatccggggtcagcaccaccggcaagcgccgcgacggccgaggtcttccgatctcctgaagccagggcagatccgtgcacagcaccttgccgtagaagaacagcaaggccgccaatgcctgacgatgcgtggagaccgaaaccttgcgctcgttcgccagccaggacagaaatgcctcgacttcgctgctgcccaaggttgccgggtgacgcacaccgtggaaacggatgaaggcacgaacccagttgacataagcctgttcggttggtaagctgtaatgcaagtagcgtatgcgctcacgcaactggtccagaaccttgaccgaacgcagcggtggtaacggcgcagtggcggttttcatggcttgttatgactgtttttttgtacagtctatgcctcgggcatccaagcagcaagcgcgttacgccgtgggtcgatgtttgatgttatggagcagcaacgatgttacgcagcagcaacgatgttacgcagcagggcagtcgccctaaaacaaagttaggcatcacaaagtacagcatcgtgaccaacagcaacgattccgtcacactgcgcctcatgactgagcatgaccttgcgatgctctatgagtggctaaatcgatctcatatcgtcgagtggtggggcggagaagaagcacgcccgacacttgctgacgtacaggaacagtacttgccaagcgttttagcgcaagagtccgtcactccatacattgcaatgctgaatggagagccgattgggtatgcccagtcgtacgttgctcttggaagcggggacggatggtgggaagaagaaaccgatccaggagtacgcggaatagaccagtcactggcgaatgcatcacaactgggcaaaggcttgggaaccaagctggttcgagctctggttgagttgctgttcaatgatcccgaggtcaccaagatccaaacggacccgtcgccgagcaacttgcgagcgatccgatgctacgagaaagcggggtttgagaggcaaggtaccgtaaccaccccagatggtccagccgtgtacatggttcaaacacgccaggcattcgagcgaacacgcagtgttgcctaacccttccatcgagggggacgtccaagggctggcgcccttggccgcccctcatgtcaaacgttagacggcaagaaaaggttccacgaactctgatgaaaaactactttaacagccctttcaaaggggaacttctttctgagcaagtgaaaaatccaaatatcagagtaggccggtatagctattactctggctactatcacgggcactcatttgatgaatgcgcgcgatacttgcttccagatcgtgatgacgttgataaattgatcattggcagcttttgttctataggaagcggggcttccttcatcatggctggcaatcaggggcatcggcatgactgggcatcatccttccccttcttctatatgcaagaggagcctgctttctcaagagcactcgacgccttccaaagagcaggtgataccgtcattggcaatgatgtctggataggctcggaggcaatgattatgcctggcatcaaaattggagacggtgccgtgataggtagtcgctcgttggtgacaaaagatgtagagccttatgccatcatcgggggaaatcccgcaaagcaaattaagaagcgcttctccgatgaggaaatctcattgctcatggagatggagtggtggaactggccactagataaaattaagacagcaatgcctctgctgtgctcgtcaaatatttttggtctgcataagtattggcgcgagtttgccgtctaacaattcattcaagccgacgccgcttcgcggcacggcttaattctggcgttaaacatcatgagggaagcggtgatcgccgaagtatcgactcaactatcagaggtagttggcgtcatcgagcgccatctcgaaccgacgttgctggccgtacatttgtacggctccgcagtggatggcggcctgaagccacacagtgatattgatttgctggttacggtgaccgtaaggcttgatgaaacaacgcggcgagctttgatcaacgaccttttggaaacttcggcttcccctggagagagcgagattctccgcgctgtagaagtcaccattgttgtgcacgacgacatcattccgtggcgttatccagctaagcgcgaactgcaatttggagaatggcagcgcaatgacattcttgcaggtatcttcgagccagccacgatcgacattgatctggctatcttgctgacaaaagcaagagaacatagcgttgccttggtaggtccagcggcggaggaactctttgatccggttcctgaacaggatctatttgaggcgctaaatgaaaccttaacgctatggaactcgccgcccgactgggctggcgatgagcgaaatgtagtgcttacgttgtcccgcatttggtacagcgcagtaaccggcaaaatcgcgccgaaggatgtcgctgccgactgggcaatggagcgcctgccggcccagtatcagcccgtcatacttgaagctagacaggcttatcttggacaagaagaagatcgcttggcctcccgcgcagatcagttggaagaatttgttcactacgtgaaaggcgagatcaccaaggtagtcggcaaataatgtctaacaattcgttcaagccgacgccgcttcgcggcgcggcttaactcaagcgttagatgcactaagcacataattgctcacagccaaactatcaggtcaagtctgcttttattatttttaagcgtgcataataagccctacacaaattgggagatatatcatgaaaggctggctttttcttgttatcgcaatagttggcgaagtaatcgcaacatccgcattaaaatctagcgagggctttactaagcttgccccttccgccgttgtcataatcggttatggcatcgcattttattttctttctctggttctgaaatccatccctgtcggtgttgcttatgcagtctggtcgggactcggcgtcgtcataattacagccattgcctggttgcttcatgggcaaaagcttgatgcgtggggctttgtaggtatggggctcataattgctgcctttttgctcgcccgatccccatcgtggaagtcgctgcggaggccgacgccatggtgacggtgttcggcattctgaatctcaccgaggactccttcttcgatgagagccggcggctagaccccgccggcgctgtcaccgcggcgatcgaaatgctgcgagtcggatcagacgtcgtggatgtcggaccggccgccagccatccggacgcgaggcctgtatcgccggccgatgagatcagacgtattgcgccgctcttagacgccctgtccgatcagatgcaccgtgtttcaatcgacagcttccaaccggaaacccagcgctatgcgctcaagcgcggcgtgggctacctgaacgatatccaaggatttcctgaccctgcgctctatcccgatattgctgaggcggactgcaggctggtggttatgcactcagcgcagcgggatggcatcgccacccgcaccggtcaccttcgacccgaagacgcgctcgacgagattgtgcggttcttcgaggcgcgggtttccgccttgcgacggagcggggtcgctgccgaccggctcatcctcgatccggggatgggatttttcttgagccccgcaccggaaacatcgctgcacgtgctgtcgaaccttcaaaagctgaagtcggcgttggggcttccgctattggtctcggtgtcgcggaaatccttcttgggcgccaccgttggccttcctgtaaaggatctgggtccagcgagccttgcggcggaacttcacgcgatcggcaatggcgctgactacgtccgcacccacgcgcctggagatctgcgaagcgcaatcaccttctcggaaaccctcgcgaaatttcgcagtcgcgacgccagagaccgagggttagatcatgcctagcattcaccttccggccgcccgctaaatatctccttttgggttgttaataaaacatccaataagttgactgtgcgtgaaaaagaaagttttgtgtgatggcgttgaagatcgcaccgttaagctcttatgtgggatggtgcagagctcgacgactaccgataaaacgcaaccgccgcaaacagacaagaaaaagccccaactgataacagttggggcttcagtattgtgattggtggagcaatagcaccctgaacccaaaaccttctcgctcaaccggtagtggctgataacaactcgtgagggctattgcgggttaagcatttagcgatgtctagggccagactggacgtctgaacgcaagccgctgatactgtacataaccacagtatcagcggaggatacccatgtcgctggcaaggaacgccacggcgagtcaatcgcccactcaaacaaacggttacgaacgccaccaacccgaccagacgctgctctaccagctggttgagcagcactacccagccttcaaagcctcactcgaagcccaaggtcaacacctgcctcgctacatccaacaagaattcaacgacctcctccaatgtggccgtctggagtatggtttcatgcgggttcgctgcgaggattgtcatcacgagcgtctggtcgccttcagctgtaaacgacgcggcttttgccctagctgcggtgcccgccggatggccgagagtgcggcgctgctgatagacgaagtcttccccaaggagcccattcgccagtgggtgctcagctttcctttccagctacgctttttgctggctcgccatccccagctgatgggccaggtcttgagtatcgtctatcgtacactctcaactcatctgatcaaaaaagccggttacaccaaagcctctgcacaaactggctcagtgactcttatccaacgctttggctccgcgctaaatctcaatgtccactaccacatgctgtttctcgatggtgtctatgccgaagatgactatggcaagcaacgcttccatcgtgtcaaggcacccacttacgatgagctgaatacgctcgctcacaccctcagccatcgcatcgctcgctgcatggaaaagcgtgggattttggagcgtgatgccgagaatacgtggttgacactggaagagggcgaagacgatacgctgactcaattacatggtgcttcggttacgtatcgcattgccgtcggcccccagcaagggcgcaaagtcttcaccctgcaaaccttgccagggcgtgaggataaagccgactcaagcagtcgagtagccaaccatgctggtttctcgctacacgccggtgtgatggccgaagcgcatcagcgggataagcttgagcgcttgtgtcgctacattagtcggccagcggtttcagaaaaacgtctggcattaaccgccaatgggcaggtgcgttacgagctcaaaactccgtaccgcaatggcaccacccatgtgatcttcgagccgctggacttcatcgccaaactcgctgcgttggtacctaagccgcgagtcaacctcacacgcttccacggcgtctttgcaccgaacagcaaacaccgagttcaagtaacacccgccaagcggggcaagaagcccgacaaatcggaaggtctcgatactaactggcgtgacaagagtcctgcagagcgccaccgcgccatgacctggatgcaacgcctcaagcgagtcttcaatattgatattgaagtctgcgaacactgcggcggtcacgtcaaagtgattgccagcatcgaagatccgaaggtcattgagcagattctcaagcatctgaaacagaaaacagccaaggcgaatgccgccaagcagcgtgagctgccaccagaacgagcgccgccactgactcccagcctgttcgatccatcacagagtcgtctctttgactgacgaccccaaatccaacactgctcaacactgccaacttttaaacggggcggtggggcagtttgtatctctcgagctatcaggctagagattttaccgccaaatcgaaccttattagagcggtttaggctggaccggcagttaaaattggggcttgagcggtaaacgagtgagggaatttcaggtaagatacttcggatgaggagcaaaaaggtggtttatacttcctatacccctggatggacgaacaagccattaagcagtggcattgcctggtccaccatggccgccgagggagaggtttccactacagtgacaccgccattgagacggccctgatgctaaaaggcttgttcaagttgccgctgcgggcgctagaaggcttcattaactcgttgttccaactgatggcggtgcctttgcagtcgccggactatagctgtatcagcaagcgcgccaagaccgtcgacatcaagtaccgcctccccagccaaggcccggtggctcacttggtcattgatgccaccggcctcaaggtctatggcgaaggcgaatggaaaattcgcaaacacggcaaggagaagcgacgagtgtggcgcaagctccacttggcggtggatgccacaacccatgcggtcatcgctgccgaagtcagcctggagacggtggcggataacgaggtgttaccgacgttgctcaaccccttacgacgcaagataaaacaggtcagcgccgatggtgcgtatgacaccaaggcctgtcatgcgctactgaagaaaaagggggcgaaagccaccataccgccgagaaaaaatgcggcaccgtgggaggaaggccatccccgcaacgaggcggtgacggcgctcaaggccggtgaactgaagcaatggaagaaagactccggctatcaccagcgctcgatagccgagaccgccatgtaccggttcaagcaactcatcgggccaacgctgagcctgcggaactacaacgcccaggtgggcgaaatcctggctggcgtgaaggtgatgaacaagctgatagggcttggtatgcctgttcgccagccagtgaattgagtggtatcaacgggttggggaacggccatccagcgacggatttggtcaacaacgccgataacacctcgaaatcggagtttatatggcttcgtgggggagttatgtgtttgagctttgtcgcattaacgcgaatcaggggttgacggcagaaatggactggaattacacttcttagagtcggcgttgccggaaaattctgattggattagttgttcggggtgcgaaaacagtcgtagttcgggggaaaaaccgaattttgacccgaaaccgcaaaaaacccgaaatgacagttcctatcaaatacttaacttgtaggttctttcaaatggataagaatgatgttgttaagaagatacttgaatcaaaaaagtacgaaaaccttgattcagatattgttgaaaaggttgtttccatttctgagaagaaatataaattaaaggaagttgagaattattctaaaaagaaattgcatcaaatatgggggtcttactattctgcctatcctaattgggataaattattaaaaaagtacaatcaggggcagttatcaatagaagatttactaaagattcattcttcgacgaatgaaagagtcgcaacattaaatgacttttacacttatgtatttggaaatatcaaacatgtctcatctattttagattttggttgtggcttcaatccattagctttataccaatggaatgaaaatgaaaaaataatatatcatgcatacgatattgatagagctgagatagcttttttgagtagcattattgggaagttaaagacgacgataaagtataggtttttgaataaagagagtgatgtctacaaaggtacttatgatgtagtattccttttaaagatgcttcctgtgctaaaacagcaagatgtaaatatcttggatttcctacagctttttcatactcaaaactttgtaatatcttttccaataaagtctttatctggaaaggagaagggaatggaagagaattaccagctatggtttgaatcttttacaaaaggttggataaaaatccttgattcgaaggttatagggaatgagttagtatatattactagtggatttcagaaataactccgcctccaaggcactcattttcttggaaaagtactaaactctgtccaacggctggagcccattgtggtgcagaaaattcaaatatatatccattttcattctgggttacttttactggtgtatcctgacttctataacggatagatgctgtatagttattattaagtaatgaagtttcgtttatcaagtgcaattctgaaacacttactatgtttttccaaagttttggattatcttttccttggacaacatagaggatattttgaggaaaagataggtttcaactacagtttagaaggttaaaaacaaatgcatgcatggctcaaaagcaatctagggaaggtgcgaataagcggggaaattcttctcggctgactcagtcatttcattttttcctgtttgagccgttttttctcccgtaaatgcactgtataccgatatgggcagggcgaagcgctaaagtacaacaatcttattgttagctattgtcttggcgttccagaaaatctttaaactcaatagtataaagccgtaacagcaccatggttaacgcaaaaataattggcccataaatcaaaccaattaaaccaaagagttgcaaaccacctgaggtatccccagaaattctgtagttaaaataaaatgttagttgattggggaacattcatggcggttcctgatctgatcattcgccaaaactcccacaccgcggatgctcaccatgaatgtaaaagctatgctcgctgatttcctcacctttgtcacgccaaaatcaatgcataaagcccgattttcggttttgctagatgcggtaaccgccctggcaaaggatgcgtgttgcaccgttactgcgattggccgggcgatgcctggctcttcagataaggtcagtatcaaacgggcagatcgtctactcaataatcctaacctgcaacgagagctgccattgatttatgctgcgctgacggcttctattgttggccataaaactaagccgatgattttggttgactggagcaatgccgatactgccaagcgacactttatcctgcgtgccagcattgccgctgacggtagagcgttgactctgctacagaagattgccgccgcagaagattatacctgcccacacctacacggggcgtttttaaagcagcttaaagccatgctacccaaggactgtaagcccgtaattgtcactgacgcggggtttaaagttccatggctgaaacaagtgcgtaagctgggatggcattatgtagctagagttcgaggcaatgtgaagcttaaattggcagagcaggacaagtttatcagtgttaatcagctttatcggcaagcgaagaaggatccaaaaagtgtaggaaaaatcatgcttgcccaaacacaacactatgaaacgcaggccgtcctggttggcaaaggttataagctattgaaacgcgataaaaataagacgtataaggaaccatggttgttggtgtcatccttagctgactgccatgggtatgcggataaaattgctaagtgctacagtagccgaatgcaaattgaagaaagcttccgtgatcagaaaagtcaccgctatggcctgggtagcgatttgcatggtaccaagaagaaatctcgcttagagatactgctactactggccgcattggttaattggtttcattacctgctaggtagcgcagcggagaaagcgggtttgcacctgcgttatcaagctaacaccgttaaaaataggcgggtattggccctgaatttccttgggatattactttgcaaagaacccaaacagcgaatacgcaggcaatattatcagcagggacttaaacaaatactacagtgggtggttcagtgggactgggcagtaatcaaacaggctgatagctgattgtatgaatggaaattttgtggggatccctcaggttgtctagacttcttttaacagtaaagttatcataaaactgaattttattttttaggtaagtttatgcattctatccgcattcgttaagacacaactatttgcatagtgacactattttataatggtgggcttttgttgtgtctttaagaatatatgcggatatataaagtaaaagtatgcttaatttataagtatgcttttagtgcatagtttccagttataacttaattgactagctatttgtccaccctgtggatgaatagctttttttttgggaggacactgtgatgctagcttttgttttcacctaaatcctgtttgctgcataaaaaatttcaagagctaaacaggagtaaataaaaatgagtttaattattaaagcgagaaacatacgcttggattatgctgggcgtgatgttttggatattgatgaattggaaattcactcttatgaccgtattggtcttgtgggtgataacggagcaggaaagagtagtttactcaaagtacttaatggcgaaattgttttagccgaagcgacattacagcgttttggtgattttgcacatatcagccaactgggcggaatcgaaatagaaacggtcgaagaccgggcaatgttatctcgccttggtgtttccaatgtacaaaacgacacaatgagtggcggagaggaaactcgtgcaaaaattgctgccgcattttcccaacaagtacatggcattctagcggatgaaccaaccagccaccttgatctcaatggaatagatctacttattggtcaacttaaagcatttgatggagcattacttgttatcagtcatgaccgatattttcttgatatggttgtagacaagatatgggagttaaaagacggtaaaattacggaatattggggtggttactcggattacttgcgtcaaaaagaagaagagcgacaacaccaagccgtagaatatgagctgatgatgaaggaacgggagcgattagaatctgctgtgcaagaaaaacgccagcaagctaatcgattagacaataagaaaaaaggagaaaaatccaaaaactctaccgaaagtgctggacgacttgggcatgcaaaaatgactggcaccaagcaaagaaaactgtatcaggcagctaagagtatggaaaagcgtttggctgcattagaagatattcaagcaccagagcatttgcgttctattcgttttcgtcaaagttcagccctagaactgcacaataagttcccgattacggcagatggtctgagcttaaaatttggtagccgtactatctttgatgacgctaactttataataccgcttggcgctaaagtcgctataactggatcgaatggaacagggaaaacgtccttgttaaaaatgatatcagaacgtgctgatggattaaccatatctccaaaagctgaaattggctactttacacaaacaggatataaatttaacacgcataaatctgtgctctcctttatgcaggaagagtgcgagtacacagttgcggaaattcgtgcagtattggcttcaatggggatcggagcgaatgatattcaaaaaaacttatccgacttatcgggaggtgaaatcatcaaactgcttttatccaaaatgcttttaggaaaatataatattttgcttatggatgaaccaggaaactatcttgacctaaaaagtattgccgcattagaaacaatgatgaagtcctatgcaggaactattatcttcgtatctcatgacaagcaattggtcgataatattgctgacattatctacgagatcaaagaccacaaaatcatcaagacttttgagagagattgttaatgatagccaatctaatccgaacattaattattgaactctttaaaggaaattaaaaatgacaattcaagatattcaatcacttgctgaagcacacggcttgttgcttacggacaaaatgaatttcaatgaaatgggcattgattttaaggtcgtttttgctcttgatacaaaggggcaacaatggttgctgcgtattcctcgtcgtgatggcatgagggaacaaatcaagaaagaaaaacgcattttagaattggtaaaaaaacatctttctgtagaggttcctgattggagaatttcatctacagaattagtggcttatcccatacttaaagataatcctgttttaaatttggatgctgaaacctatgaaataatttggaatatggacaaagatagcccgaaatacataacatctttggcaaaaaccttatttgaaatccatagtattcctgaaaaagaagttcgggaaaatgatttgaaaattatgaaaccttcagatttaagacctgaaatagcaaacaatttgcagttagtaaaatctgaaattggtataagtgagcaattggaaacccgctacagaaaatggttggataatgatgttctatgggcagatttcacccaatttatacatggcgatttatatgctgggcatgtactagcttcaaaggatggagctgtttcaggcgttattgattggtcaacagcccatatagatgacccagcgattgattttgctgggcatgtaactttgtttggagaagaaagcctcaaaactctaatcatcgagtatgaaaaactagggggtaaagtttggaataaactatatgaacagactttagaaagagcagcggcctctcctttgatgtatggtttatttgccttagaaactcaaaatgaaagccttatcgttggagcaaaagctcagttgggagttatataatttaaaaatatgattgctgagaactgccttgttttgaaacttggttggctttaattagtttttagtattctttatagaaaatgcctcgatcaaggggcatttctaacaatcatttaacataaaatttcttatacgaaatgcttgatatttctctttaaatatcattatattaacgtaagccgttctggagtatagggcaccagaacggctttttattgattattcatgttccacgatcactaattgagcgatgttccacggttttattcagttttaataaacatcatccggttttttgaggagtcattatttcaagtgcttgcactgaaattggctcttcaaaaaactggagtcttggctaaccatatggaaggaaaaagcggcttaggaagcctctcttcttctgttctggttcaacatgctccgggataggaatacgcttattgtcttgctgaggagtagtcaattcgtcatagttcgttgctagttccgaccgaggatccgttgctatatcctgtttaaagctctgatcggtaaaggtagtcatattggcttttggtgcttctagtaagcgctgcatagcttcaatctgttcttgataagtaagcgtaacaccaaccacaccttgcggtgtggctgttgatcagtaaggcagtagttgttgcaattgctcgtgggtattggctttgggcaactctgtcagcaaccggcataagtaatcatagggttccagaccattgattttggcggtttcgaccaagctgtacaatgcggcactggcctgtgcacccgacttggtattggcaaacagccatgccttgcgaccaatcacgaacggtttgatggcgcgctcagcgcgattgttgtcgatattcaacctgccatcatccagatagcgcatcagcttgggccactggttcaggctatacgtaatagcggctcccagtaaactttctttcgtgacactctcgcttgatttatccagccagcttttgaattgttctaacagtggcttggctagcgtttgtctggcgtcatatttcttatcaggcggcacggtttttaattgactctccagtgcatagagtttctggatatggttaagggccacatccgccttacccgttttgcctttaccctgcgctttttgtgcttcaacgaacttacgtctggcatgtgcccagcagccgactaaggttgcatgggttttctcatatccggcataaccatcaacctgcagatagccggcaaaccccgccaggaagtcggtgggatgtatgctgctgcgactatcctgataatcaaacagcaccagtttggggccagtactttgctctaagccacagccatatacccacatgtagcaggtgcttttctcaacatccagcacattaaccgtggtttcatctgcccatagcaccggctgtttcagaagctcagctttcattaacgccagtaacggtttcagtttctctgcacagcttatcagccagcggctcatcgtttgacggctaagctcaatgccggcctgattaaacaactgctcctgacggtacagcggcaagccatagtgcattttgctgctgatgatttgggcaagcagactcggtgtggccatgcttttcgggataactgctggcggcacatcggcaatttttatctcgaccttggtgccgttggtctcacactgccggcagctgtatttcagccgcacgtttctaagcacccggatttgtgctgggacgaactcgagttgctcactgacttcttcacccatttgatgcagcgcatggccgcagcaggtacaggttttatcgtcaatatcatggataacatcaacgcgcggcagctcaggggcaatccgtgggcggcgtggcttagcggctttctcagcgctctcggtcgtctgattatctggctctgtcgctactgactcgtcttcaatcagctgttcggcctcatttaagacttcgccatcaccttcgtaggtctcgctgctggggctaaatttctggtacttcttcaggttgtaacgctccagcaattgctgcagcttgtccgacagttgctggttaacccgctctaatttggcgatgcgtttatctttttgcgccagtttccgctcaagcttttgcgtctgctcaagcagcattttcttgagcagttcaacatcatcaggtaaggattgaggtgtctttttcatggccgctattgtaacggccaattggactaagtgcttggtaagatttagattgttttggatgcgatcacaaggatttatagccgatcgtcatatcagcccacactctggtaatgcagtggctgatgggcggtgattttttgaatatcgacaccttgcaacagccaatgccactgttgttcgctaatagacaggattttgccaggcatctgccttggccagcggaacttgtctttttcaagccgcttgtaccacaagcaaaagcctgtgctatcccagtacagtacttttaaccgggtacgctgctgattgcaaaatacaaacagtgcgccactaaaaggcgagagctgcatctcttgctcaactagcaacgataaaccattaatagatttacgaaagtcgaccggctgtttatgcaaatagacctggggcacatcaagaaacattttcatggtcagagcgctctgagcaaggccgctaaccacagcacatcagtgccggctggaaactgcaattccacatcacgcttacgtagtaaaatggatttattcagctgcaagccctgtggcgtcagctcaataaagccaccgtcatcatcctgaaacgccaacaattgtctcttgcgataactaaaatatgtaggaatgatgccctgacgttttgcaaattcagtttgggtgaggccactttgggcttgctcggcgaataaagcgaaccattgttctttggtgcggtgcatgatgattaccctggcagttgataatggcagacagggtaaagttgatcagttaggattggaatgtgtggttggcgttacgcttaccttgataaaacgattcacgttctaaagattgattttctctctgtattgcctgatttaattgtttttccagtatgtcaacttgacgttttagtaagtcaacttctgtcaagttttgactgttaattgattgactttgattgactgtatcctcttttttttgtggttccccaaaaactcttagggcctctgaaaagtcaattaatccatcagatcctttagataaatttcctttgtttatatgtgcatatatggcttgtcttgaatatccataaagcttagctaactctgaaactgacagttttttcattatgtaaaccagttttcaacttgtgttaatacctgactgttaacttaacaatttcaattaacaatgtcattgaaatcctaattttctgagtaaaggaagtaattccttaaatttctctgcatcttgcagcatggcagctatacgtacagcaaactgctgatagctttctgtgccttgtgaatatttactcatctcaggaagctctgagagcttgttggcgaatagatggcgttgtttatctgttatttttgaaaagaggtctaatgtattcggatctcttttagattcgactgaatgcgtggctgattttttctgtttaaagctaaatgaaaaaccagtaatagatctacctgttttatgctgttcaactttgacaataatatcggtatgttcatttacttgttttaatgcaatgtctaaaacatattttttaaaatcatacattcgtttgtattcagtctcgagtacacctattttttgtctaaaatcatacatagttatgagaggcgtttttccagtactacgccatgcaatcaatatttcatataaacgaacagcataagcacttgttaaattacttatttgttgtatttcatactttgtaaattgttcttctaacctagtaattaaaggcacaatagcaggggcaaaaataagtctaacgacagcttcattatcaatataagccacctcgctcacccatcttgatttgtgattaatagtgttacctttttcactaagactctgataactgaattgtcttgcaaacaagtcatcgcaagcatcttttaacgcctgataagccgtatttcgatgtacacgggcactgttgcaaatagtcggtggtgataaacttatcatccccttttgctgatggagctgcacatgaacccattcaaaggccggcattttcagcgtgacatcattctgtgggccgtacgctggtactgcaaatacggcatcagttaccgtgagctgcaggagatgctggctgaacgcggagtgaatgtcgatcactccacgatttaccgctgggttcagcgttatgcgcctgaaatggaaaaacggctgcgctggtactggcgtaacccttccgatctttgcccgtggcacatggatgaaacctacgtgaaggtcaatggccgctgggcgtatctgtaccgggccgtcgacagccggggccgcactgtcgatttttatctctcctcccgtcgtaacagcaaagctgcataccggtttctgggtaaaatcctcaacaacgtgaagaagtggcagatcccgcgattcatcaacacggataaagcgcccgcctatggtcgcgcgcttgctctgctcaaacgcgaaggccggtgcccgtctgacgttgaacaccgacagattaagtaccggaacaacgtgattgaatgcgatcatggcaaactgaaacggataatcaacgccacgctgggatttaaatccatgaagacggcttacgccaccatcaaaggtattgaggtgatgcgtgcactacgcaaaggccaggcctcagcattttattatggtgatcccctgggcgaaatgcgcctggtaagcagagtttttgaaatgtaaggcctttgaataagacaaaaggctgcctcatcgctaactttgcaacagtgccaggatgaggaaggcgagatggtacgtatgtatgtagcagatactttttaatagaacttaaagagcatctattaaaaaatagcctctagtgaggctattttttatggcttatttatttttaaaatttttaataatcattagaagggcgaccagtgacaataagataataaaactaatataactatttgccgtactcatcagcccaattttacctacaaaatagccagctaaaattgcaggaatactaaaagccaaataactttcaacaaaaaaagcagccataagacccgcacgttcttcgggaagtgccaatggcattacactacgaatagcccccataaatgctgtaccaaaaccaactccagtaataatagaacctaaaaatagaactacagcattggttagattaatggcgatgaataagacaatggcaccaatagcaatcgagagcgtaccggttaataaaatacggaaatttgtcgacttcctaagcgttaatatacctaccgcaccggaaagggcgagcgccataaacataatcccgtttagccatgccgatgacgtgtggaaaatttttgccagtaaagatggcataagcgataggaagaaaccactgaccatccaaagtgcaatgttaatcgggctaatactcaataaagcgctttttgtctgtggcggaatggccatattgggttttaatgaagcaagtgcaccggatcttctttgtgcggtctctggagtaagaaaacttaaaatgagttcacaaataagaagaaaacataagaactcaaaaacaagctgtaaggggtgggcagagaattgcaaaatagaacaagtcagaaaaatcccaacagccatacctatcattggtgcaatactattaattagtgaaccatgaagcttactaaaatctaaaattgctgcgcctatagctgaaacagcaagccctgttgcgattccttgtaagcctcgtgcaatgaataacatcgaaacatctgaagcaaataagaaaaagctcattgaaataatttgcaaagaaatagctgcaataatgactgggcggcgtccaatataatcagacaaagaaccaataatgagtaatgagccaagcagcgtaaaagcataggtggcaaaaatcaaagtcaatgtaaccggtgaaaattgccaaagctgttggtatagacggtagagtggtgtcggcgcactagatgcagccatgaatgtcatgagcgtgatggtattaagtgtcaaagcacttgccgcatctaattgaaaaacagctcttgaccgttttgaacttgaattgttcatataagatgaataacataaaagcaaatatttagcttttatacattatttttccactaaagcaaatccttagctttagtgtattttgtatatagttataaatatttataaattttttgatccctttacagagtttataaatggcaaaagttgttactggattacgccctggtggacgcagcgaaagaatacaaactgcggtgcatcaagctgtaaaagaactacaaaaagattttgagcaaagccaaattactattcctatgattgcagtgcaggcaggggttacaccttcaaccatttaccgtcgatggggtgacatcaatcaattattttcagatgtagctttaaatgaactcaaacctgacatggaacccaaagatttaggttcgttccaacaagatattacagcatgggttgagcaatattttgaagaatatgcttcagaggttgggcaagacttattgcgagatgtactctatacatcaaactcggattctaatgcccgtaaatgtgagactttaattatccagcagctcgatattattcaaaacagggcaaaattacgtaatgagcttactatacctaatcaggtaatcatcgaggcagtgattgcacctatgttatttcgaattttattcaccaatcatgaacttagtcttgagtatgtatatgatcttttaaaccgtctttttataaaaaataagtagataaaatctataaaaagactagtcccttgtttttattaaataaatatatatcaatctttcttattatttaaaaaataaattctcataatttaagattgatatgaggatgagttaatcatttatttttgaaatacttgttctgcctatttaaaaatcaaaaataaacatagataatgcatgatgtaattaattaaattattttataaacatgcatttatgtaaatttttaaagacttttagttttatgaaacttattgagataaatattttctatacaaaaatatgcatggtttttaaattttacattttttaaatttatgacacagggtgttttttattctttacaatggctccacttcatttaaagcagcttgtggtgcacgctttatattttatttttttatccccatcgaaaaggtatttagataatggatttcaatacccttgaccaagaaacggtacagaaaaaacaaaagtttcatcaaattttgtatgtacaggtcatctttgcaattattttgggcattttaattggtcatttttacccagaacttggcgaaagcttaaaaccgcttggtgatgcattcatcaaaatcgtcaaaatgattattgctcccgtaatctttttgacagtggttaccggtattgccagcatgacgaacatgagtcgagttgggcgagtgacaggtaaggcaatgctatatttccttactttctctagccttgcgcttgtggttggtatgattgtggctaatatcattcagcctggtaaaggcctaaatattgacccggcaaccttagtcaacgataaagtaaatagttacgttgaaaaggctcatgctacaaatatcactgactttttcatgaatattatcccgcaaacattagtgagtccgcttgctggtggtgaaattttgcaggttctatttgtggcagtcctatttggtatttctttagctgcattgggtgaccgtgcacgtccaattactgattttttaaataacctcacggctccggttttctatttggttggcatgttaatgaaacttgcaccaattggagcttttggtgctatggcatttactatcggtgcgtatggaattgaatcaatcggtaatttattactattgattatgaccttctatatcacggcagtgctgttcgtattaatcattttaggggctgtagcacgctacaatggcttttcaattatcgatttaattcgttacatcaaagacgaactctggttagttctaggtacaagttcttctgaagctgctttaccatctttaatggataaaatgcaaaaagcaggttgtgaaaaatctgtagtaggtctagtcattccgacaggttactcatttaaccttgatggaactaacatctatatgactatggcggctttatttattgcacaagcatgtaatgttgatttatcaattggtgagcaggttgcattgcttttagtggcaatggtgagttctaaaggtgcggcaggggtaacgggcgcaggctttattacactcgcagctactttatcggtagtacctgctgtaccagtggcaggtatggcgcttattttaggtattgaccgttttatgtcggagtgtcgtgcattaaccaatttaattggtaatgcatgtgcaaccattgtggttgcccgttgggacaaagctctggacaaggacgttctagataaagctttacgcaaatcgaaaacgaattaattttttaattcgaaataaaaaacctgtagcaactggcaaatcgggagaggtgctgtgctacaggttttattatttaatgatcaaaaaaatataatttaaaaactatatactcattaatagttattaaggaaagccactataaaaatttcacaaattttcgtatagaactactttttaaaaagcagaacttttgagttatctacactataaaaatagtatataaactagcttaggtttatgcttttaagtgatcctcaaattcttcacctaactgcattgctaaagcattacctgccaaatcacaggtcactaagccatattcttttttaaaactgaaagtaaaaccttttccatcagcaaggtttttaaccgaataccctaatttttctaaccaaatacggaacgcaattaaatttttcgctttaacaacctttttcacgtgagaactccttctatccgtgtcttacaccttatttattaatagggatttactcgaattttttaaagggggaaaactttgttttattttgcatcttgtaaaaaaagtaaaatagataaagcaatatccttcattttataaatttattctctgtacacgataaaaatagataactcattgaaataatgtcataataattgttttctaacgacgaatactatgacacatctcaatgagttatatcttatcttaaacaaatatctaaaatggaacaagtcacatttaaagtgctttgcgctcatcatgcttgtgattattttaaagcaaacatgtaatctttcttctgcatctaaagccttgcccatcaagtgcttaccacaatcattttatcgacgtatgcagcgcttctttgcaggtcagtattttgattatcgtcaaatttctcagttgattttcaatatgttttcattcgaccaagtgcaactgactttagatagaaccaattggaaatggggaaaacgaaatattaatatcctgatgctcgcaatcgtttatcgtggaatagcgatacctatcctttggacattgcttaataaacgtggaaattcagatacgaaagagcgtattgctttgattcaacgctttatagccatttttggtaaagaccgtattgtgaatgtgttcgcagacagagagtttatcggtgagcagtggtttacatggttaattgaacaagacatcaacttctgcattcgtgttaaaaaaacttcattgtcaccaatcatttaggaaagaatcataaaattagtgatttatttcgccatcttaaagttggtcaaattgaatgtcgtaaacgacggattttggttggtcgggtgaaactatatataagtgcactacagttagaaaatggagagcttttactcgtcgtttctcctcagtttaatgccaatgctattcaggattatgcattacgctgggaaattgaaaccttattcagttgtctcaaaggacgcgggtttaatcttgaaaatacgcgcttgacagaccctagacgagtgaaaaaattgattgcggtgttagctataagcttctgttggtgttacttaacgggtgaatggcaacatgatcaaaaaaaagcgataaaaataaagaagcatggacgactctcaatgagtttatttcgctatggtttagactatgttcaaatggcgattcagcgtttaattggttttgggaaaaaagaagagtttaaggaaattttggcaattttaagaaggcagaaccctgataggataagggttctgtgaaatttgtcgtgtacagagaaatttattaagtttttatgtaattaatctgaatatttataaatcctaagcttttgttttttatatatattttaaaataatggtattgggttgaaatttaatcaatttaaattaatctaaaaacaataaatgtaaaaaataatttcatgcaacatgctttattcaaaaagatacagttcttaaaattaaactgtatcttggttgaaagcttataattttaaaaattgtcttttaagctacgtaagtgagcgaactcatctacactttcagcacgtaaaaacggatttgttgctagttcaagttcaatactacttggcaaggtaattttaccttcttgacgaagcatgcggacttgttcagcacgttcttgcagtgcgtggttttcaggttctacactcaaggcaaattccgcattagaaagtgtatattcatgtgtgcaatacactttggttgcagtgggtagtgcagcaagacgatttagtgagtggtacatttgttctgctgtaccttcaaatagccgaccgcatcccattgcaaacaaagtatctccacaaaagagggcattaagctcttcaataaaatatacaatatgacctaaggtatggccgggtgttgcaataatctctacatttaaatcattaaattttagatgatcatcgtgttgtaagggatgagtaatgccagggattttacttagttcatctcttgggccatataccgccatagacgtgttagccgttaaatcagcaacaccgccgatatggtctttatgccaatgggtaagccaaatctgttttagagttaattgatgttcttggcaaaagtgggtgactaactcagcctctgttggatcaactgcaacagcttcatgagtctcagtatcttctaaaatccagatatagttttgtagggcattttgcacatcaatataatgaattctataacgcatttttttatcctgaaactaaatccaaaagcagtatctacgggctaattttgataataacagaaattaccttgagtaacgtgtctaataaaatgctctataaattagactctctaaaataaaaaagccctcatggaagagggcttttgtaggagttcaattagcgcatttttgcgagccaatttcctagcatttgaacgatttgtaccaaaagtaataatacaataaccgttaaaataacgacgcttgtatcaaaacgttgatagccataagaaattgccaagtcaccaataccaccagcaccaactgcaccagccatagcggttgcaccaataaggctaatcgtagcagtcgttaagttcaaaataagcgaactacgagcttcaggtaagataaagcgcgaaataatctgccaaggagttgcacccatagcttgagcagattcgataattccttcatttacttcaagcagggaagtctcaataagacgtcccatatatggcccaacgtaaattgttaaaggaacgatcgctgcccatgtaccaattgaagttcctaccaataatttggtcagtggaataactgcaataagtaaaataataaatggcagagaacgtaaagcatttacaattgggttgagtaaatgataaatgaatttatttggcaaaatgccttctgggcgggttacaagtagaataatcccttggataaagccccaaataccaccaaataaaagcgcaaagaacaccatatggaaggtttcttgtaacgcagttacaaactggtcaattgaaagtgaactgtgccagaaaggttgagtaagttcagttaaccactgtacgattaaatctctcatacttgatctcctgattgaactacactcacttcatttttctctaaaaactcaatcgcctgacgaatcaactgtggatcacctaaaagctgtacaaacatctgaccaatgacggtgccgttaatttcagtcatattggcaaataagatatttaaactaatatcaaattgtttaataagcgactgaatcacaggctcttgtgctgaacgccctaagaactgtaagcaataaatgctgtgatgatgctggttttcaagttgatttaaaatatttacaggcaactgctgatgtaaaacagtttgtataaagtttttagttgtcggatgttgtggattactaaagatatcaatggttgagccttgctcaatcactttaccagcttccatgacagcaacatggtcacatacagtctcaatcacatccatttcatgagttaccatgacgattgtgattttttgctcttggttaattttctttaataattctaaaaccgactttgtcgtttgtgggtcgagggcagaggtggcctcatcacacaaaagaattttagggtggttggctaaagcacgagcgataccaacacgttgtttctgaccgccagaaagctcatctggataagcatcttttttatgcttaagatcaatgaattcaagtaactcatttaaacgcttttcacgttctgctttgctgtaatttagcagacgcattggcatttcaatattttcagcaactgttttggtttgaagcaaattgaagtgctgaaaaatcataccaatatttgcacgttcctgacgtaatgaacgcgcatccaaagcagtgaagtccttttgattaatgataacctgaccttcatttggtcgttcaagtaagttaatcaggcggattaaagtacttttacctgcaccactatagccaataatgccgaaaatactgccttcaggaatttccaaattaatttggtccagtgcacgtatagtttggcctttaagctgatagtgctttgaaatgtttttaaattgaatcatgtcgtcaaaaactatgctaaaaagaaaaaacaggcaaagagtctttgcctgtttcgcgttgcagctattatattactatttagcttgcgtgaggtagctgattggctgattcacgtcaacttttgtaccaccaaagtgctgttcaacgtattttttaacagcttcagtgtggtaaagctgaccaactttctgaagaacagggtcatctttacgtgattcagcagttgcaagaatatttacattcagctttgtgctttggtcaactggctcataatagatagaatctttaagcacatttaaaccaccttccattgctaaagtattacctaaaacaattgcatcaacttcgtcttttacacgaacagcagttgccatctgaattggtttaatgtcaatttttttgctgttgtcagtaatatcgcttggagtgcctttcgctggatcaaagtcagctttaagcttgattagacctgcgctttgtaacaataacaatgcacgagcttcgttcgctgcatcattaggaatagcaatgcttgcaccttgagggaactcatcaacttttttgtatttacttgagtaaatacccattggttcaagataagttgtagcaacaggagcaatcttatctttatttgaagcattaaatgcaacaaggtaggcataagattggaatgcatttaggtcaacttctttgtttgcagtagctgtattcattgcaacataatcagtgaagtttttcacctcaagtttaagaccggcagctttagtttccggtaaagttgcaatatagcgccaaatatcagcgtcagaaccagtagaagcaatgactacagtttgtaactgagcagagtctttgccattttgtggttcattttgctgtttgccgcaagctgcaagtaatactacagacacgcttaaaaaaagactgatcagctttttcatgtaaaaaaagtcctgattatgagagatctcaaccattcaggttggctctcagctgggaaaattggtgatgttgaaagttccaacggtttaaccaatcataacaataaaaacatattcaatatagtggacatgtttcgatcttattaatcagaattgaataaaaattaagattaatatgaatatttgtgataagtgaataagcaaaataaaaaagccctcataagagagcttttttactatttaaatttttattcagctttttcacgagcaatagcacggtaaccaatgtcactgcggtattgcatacctgtgaaggttacttgcccacatacttctaaagcattgatttgtgcttcaagaacgctgtcacctagagcagtcacgcaaagtacacgtccgccagaagtaacgatatggccatcttcacgagtagcagtgcctgcatggaagattttagtatcttctggtgattgaccgatacctgagataacgtcacctttacgcacgctgtctgggtaaccttctgctgcaagtacaataccgattgacttacgctcatcccattctgcttcgcttggtaagttacctgcgatacctgcttcaaccaaatcaacaagagatgacttcaaacgcatcatgataggttgagtttccgggtcaccgaaacggcagttaaactcaattacgcgtggttgaccttgttcatcaatcattaaaccagcatataagaagccagtataaacatgtccatcagcagccataccatcaacagttgggcgcataatttcattcattacacgctcaaaaacgtctggagtcacaactggagcaggagagtaggcacccataccacctgtgttaggaccttggtcaccttcaaaaatacgtttgtgatcttgtgaagttgccattggtaaaatgtttttaccgtcaatcatacaaatgaaagaagcttcttcaccagcaaggaactgttcaattacaacacgtgagcctgcatcaccaaatttgttgcctgcaagcatgtcatcaattgctgcaaaagcttcttcattggtcattgcaacgataacgcctttaccagccgcaagaccgtcagctttaattacaattggtgcaccatttttttcaacataagcttttgctgcatcaacttccgtaaatacttcataaaaagcagttgggatgttgtggcgttttaaaaagtgcttagcaaatgcttttgagccttcaagctgtgctgcatattgagtaggtccccaaatttttacgcctgcttcacgtgcagcatcaacaacaccatttactaatggcgcttctgggccaacaacaatcagttcaacattattttctttagcaaaagcaataattgccgggttgtctaaaatatcgagctgaacgttaacgcattttggttctgttgcagttcctgcgttaccaggcgcaacgaaaacttgagtaactttggcatcttgcgcgattttccatgctaaagcatgctcacgaccaccactacctaaaactaaaatattcatttttaatttgttccttaactttaatcctttttcatccccctctatttctcaaggtggagagatagttccattattgtggaaaaccctcctgaataaaaggagggttagggaggactagatttaaattagtggcggaaatggcgcataccagtgaagaccattgcaattccagcttcatcagcagctgcaataacttcttcatcacgcatagaaccacccggttgaataatgcatttaatgccagctttcgctgcattatcaataccgtcacggaacgggaagaatgcatcagatgccataactgcgccttcaacaaccagaccagcatgctcagctttaattgctgcgatacgtgctgagttaacacggctcatttggccagcacctacaccaatagtttgacggtttttggcataaacaatagcgtttgattttacgtatttcgcaactttccatgcgaaaataaggtcatcaatttcttgttctgttggtgcacgtttagtcacaactttaagatcatctttggtgatcatgcccaagtcttggtcttgaacaagtaagccgccgttaacgcgtttatagtcaagttgtggagcacgtgcatcaattgcaggtaattcaccacatactaaaacacgaacatttttcttcgcgccagtaacttcaagtacaccatcagcaatacttggagcaataattacttcaacgaattggcgatctacaattgcttgagcagtagcaacatctaactcacggttaaatgcaataataccgccgaaagcagattctggatctgttgcgtaagctaaatcataagcagctttaataccgtctaaagaaacggcaacaccacaagggttagcatgttttacgatgacacaagctggttttgcaaatgatttcacgcactcaagggcagcatcagtatcagcaatgttgttataagacaattctttgccttgtaattgttttgcagtagaaacagaagcttcttttgcatttgcttcaacatagaaagcagcagattggtgtggattttcgccgtaacgtaaatcttgtgctttgtttaattgggtgttgaacgtacgagggaataaatctgcttcaccttcggccttaccaacgcgagcgcctaagtaagaagcaatcatgccgtcatattgagctgtatgttcaaatgctttaaccgctaaatcgaagcgtgtttcgtaagaaagtgaaccagaagcttttaattcgctaataactgtatcgtaatctgaagcatttaccacaataccgacagatgcatggttcttagcagcagcacgtaccattgttggaccaccgatgtcgatattttcgatagcatcagcaagagaacagttaggtttagctactgtagccgcaaatgggtaaaggttaacgacaactaaatcgattggatcgatgttgtgttcttgcataacagcttcgtctagaccacgacgagccaaaataccgccatgaatttttggatgtagtgttttaacacggccatccatcatttccgggaaaccggtatgttcagatacttcaacaacagcaatattattatctttaagcaacttgtatgtgccgcctgtagataataattctacccctaaagctgcaaggttttgagcaaattcgacaattcctgttttgtctgatacagaaatcaaagcacgtttaatagtcatgatgttcaagtcaacaatttcaagtctacggattaaaaccaattagaagcacaaaaaaaatgcccacgaagccgtgagcattttatcatttattcactcattaaaccgtgagcttttaactttttacgtaaagtgccacggttgagtccaagaatttctgcggcacgtgtttggttaccacgagtatattctagaactacagataaaagaggtttctccatttctgctagcaccatgtcatatacctgagatggttgctcaccttgcaattgtgcaaaataatggcgaactgcgcgatccacgtggatgcgaagagcaacatcagattgtgcagtaaaaataggagatttgctattcatgcgagttaatccgaaaatcaaatactagcttgggtaaagtagtatataaatgtggtctaaaaatacggagtcctgttttagatcctaaaacagtgactctaaaacataagaacaattagcttgccatatttcttcgtattgagtaaaaaataagcgtaacaataattaaatatttgttacagccccctcaaaaacaaaaaaagttaggctatgcgcttaatgtagaaaagcacacatgcttaacagtatattttttgaattgagagcgaggagtatatgagtcaaagctttcgtggcgcgtatcataccattgtctaggaaaaagtgagcaaattaactgcattttttttaattttttttcactttttttacaaattaggggtggacaatttctaatcgataatttactaggctttttttgcttttatttagctcaacttggaatctaaaaggtgtattggtcggaatgcgttgaataccccgtaagttttcgaccaagtattgttgaggggtaaaaatgatttcttcttgatcggtttctttgccaaagctgagttttaggttgggcaactcaatacttttattattctgatttatgagaacacctgaaagttgagtatgctctgtaccaattttacgtagctttaccttttctatataaagaagttgatattgttcagctgacttgttgcaatgcaatatttgacaaacataattaaatgcatggctaatcgcagggctttgttgcatgagtttagggttaaaccaaagaatctgaaaagtaaaaaccaaaatcagaatcagatttgcagaactccaaagcgtatagtacaaccagctatgctttttaccgttatcttgttcaggagaggttgcttgctcagccaaattaagattaggaagagcattaataggttcattatggaagtaatttaaattattcaaataagtcaaaagatcaatattagagttttcaactttttgatcaaagatatctaacacatgagaatgggtcatatatcgtgtttgcatagagccatgagctaaagcagatgagtttaccgtttccggctgctcaacatttactaaattagtcagagcattaaaatttaaattacatttagggcaacaaaccataccctgagcaacagttaactgagtaagagaaactttataaactgttagacacttagggcagcgggtttgtttttcattcatgagttaaaacatctcaatttgttgttttacgttttcctgaaatgcggcaccagttttcttcgcgcttttcgacatctaatatatcaaaaaattcagaataaacacctgaaacatcagcaacttgctcttcgattacaccagcaagtgcgaaatcaccatcagatttaagtaattttgcgaactctggcgcaagtgccattaaaggacccgctaaaatatttgcgactaaaacatctgcttgttgaggtttgaattcttgatcaaactcttcaggaagacctacatataaacggtctaatacaccattgagttctgcattttgtttagttgctaaaactgcttgtgggtcgatgtctgtcgcatagactttcttagcgcctaataataaagctgcaacacctaaaatgcctgagccacagccataatcaatcacgatcttatctttaacatcagttttacctaaccattgtaagcataagaaagtacttgcatgattacctgtaccaaaagcaaggcctgggtcaagcttaatatttgtagcatctgcttctggtggctctaaccattcaggaacaatccagaatttttccccgatctgaattggttcataataatccatccatgcgcgttcccaaacttgatcttcaagttcttcatgacgcatcggcacatctggaagttgtgcttttaagaaagcttctaaagtatcaacatcaattgggtcttgttcgtcttgttggtaaataccagtaacaatgactttgttccagagtggtgtttcacctggtaatggttccagtaaagcctgatcttcggcatcatccaaagttacgcttaccgcacctagagacattaaaagtgtttctgtgaattcaacttgttcttgatcaacggtaatgtgtatttgtaaccacttcacgaaaaggacctaaaattttatttaaaggcatattgtagccgactagagtagtttaaaaaagaaaacggcccatctttaatggaccgctttttgaaaatgatgatgtgatatagaagaatataaaacgatttctctatatcttaagtcaaaactgtattaaggagcaggggccttgaattgtaatttgccattttcgttcggctggcaagtaccattaaaggttacaccgttgtgattgtaagaaacccattcaccttgctgtttttttgcacacactcgaatttgtttttgagtttcggctttgctcgtgtcagcagcgtgtgtaaaagtgacgcctgaaaaacaaattagagatgctgttaagattttcaacatggtcgttttcattttgtgttccttctagttgcgttaattttaaagtcatagaagtgctgtacgttttttattctaaaatgaaaaagttttaaaaacattcactttgtattgaattcatgaaacaaaatgtcaaaacatgtggcttaccgtaaatcatgtcacgacaattttgtaattatgtacatctataagcagataattttgctataatgttccgtcttttttttctggtgtttttgtactcatgcactatcctaaagtttatgatgttatcgttatcggtggcggtcacgcaggtacggaagcggcgcttgctgctgcgcgtatgggacgacagactttgcttttgacccataacattgagactttgggtcagatgagctgtaacccagcaattggtggcattggtaagtcgcacttagttcgtgaaattgatgcgcttggcggtgcaatggctttagctgccgataaaggcggtattcaattccgtattttaaactcgcgtaaaggtgcagcagtacgtgcaacgcgtgctcaggctgaccgtgttcgctataaagctgcgattcgtgagaccttagaaaatcaagcaaatcttgatattttccaacaagcggctgatgacctgattgttgaaggcgatacagttaagggtgttgtgacccaaatgggtatccgctttgatgcaaaaactgttgtgttaactactggtacattcttgggcggtgttattcacgttggtttagagaaatcaagcggcggtcgtgctggtgatcctccttctattgctcttgctcagcgtcttcgtgagttgaaattaccggtaggccgtttaaaaacaggtacacctccacgtattgatgcacgttcagttgatttttctgttatgacaccacaaccaggcgacttcccgtctccggtaatgtcgttcatgggtgatgtgtctatgcacccagaacaagtgaactgctatatcacgcatactaacgaaaaaactcatgacattattcgtggtggcttagaccgttcaccaatgtataccggtgttattgaaggggtaggtccacgttactgtccttcaattgaagataagattcatcgtttctctgataaagactcgcatcaggtattcttagagccagaaggccttgatacacatgagctttatccaaatggtatttcgacttcattaccatttgatgttcagtttgaacttgtgcgctcgattcgcggtatggaaaatgcccatatcttacgtccgggttatgcaatcgaatatgactatttcaacccgcaagctttgaaatttaccctagaaactaaagcaattaacggcttgtattttgcagggcaaattaatggtactaccggttatgaagaagctggtgcccaaggtttacttgcaggcttgaatgctgcacgccgtgcatgggaacaagaagaatggacacctaaacgtgaccaagcttatatgggtgtattggttgacgacttgattaccctaggtacgaaagagccataccgtatgttcacttcacgtgcggaatatcgtttgatgttacgtgaagataatgccgatcaacgtttaacaactattggtcgtgagcttggtttggttgatgatgttcgttgggcagcttattgcgaaaaaatggaagctgttgagcgcgaaacatctcgtctacaacatttatgggcggcacctaacaacccaatgggtaaaaagtttgttgaaatgacaggtgctgatttaagtaaagaatgtagtgcgattgacttgcttaaacgtcctaatattaattttggccaaattgcggaacttacaggttctgaagtatcacagcaagtcggtgagcaaattgaaattgctgttaaatatgaaggttatatcaaccgtcagcatgaagatgtggctcaattaaaacgtcttgaagaaactaaaattcctgctgattttgattatgacgtcgtttcaggtttatctcgcgaaattactcagaagttgaaaacagttcgcccggaaacattagctcaagcgagccgtattcctggtgttaccccagctgctgttcagcttgtaatgatcacgattcgtaaaaataatatgacgaaaaaaacggcttaattatttaagcgtgtaaaaaagcccggttaagactgggcttttttattttctgatcaaaaaatatctggaattttcctaagcatcaaaagagattttgcatcctttttttcttatttcacaagttttaaagcgaaagttatattaaattcacgttcaaacaagagggctttaaacatgacaatgaaatcaattcgctacaatggatatgaaatggcatgccaatgctcatgttcaacatagcgcaaaagaaagagcagatcatttttggtgggggaaaacatattgatctgaaaataaataaaagtataaatgccaatataaaattaagaaaattacaattcaaaatctaaagagaaccatatggttctcttttttatatctactgattatttgctatcaggctcaatttctcgcacagcattgtgtacttgggctggctcaatatgaagcagttttttaccaaaactccgtaaccaccatacgagttgggacgtaaatggaacggtcgccgtaacttcgacaatattttcttcaattggggtaatggtctgatctttacttaactgactttcataaaaagttttagcagtttgctcggtcatggttaaagtaagctgaatagattcagtgggttggttgtaatctactctgaaacctaaagcccctgagtcaatataatggtcaatatcgaaattgacagggtgtaaagcccgactttctaaaactttagcagatttgaatcggtgcaaggcaaatgtttgtacttcagttttatcatggcgcgtacaaattaagtaaatcacagcacctttttggaccaaagcaagaggatttaaaatataagttttatcttcgccttgatttacacgggcccgatagacacactcaatctgtttgtcttgtagtagaccttcataaattgcctgctgagcggcacggtccactacaggtggaataagaggttggcttgctggcacaatacggacacgattaatccactgtcttacattattttgtgtagatagactacgttttgccaaatcgaaccaaggccccatctcatcaagtagactgggtggaagtaaatgtttgagatgttcctcaaccatcataaaagttacagcttgagagcttgtcatatgcggtaagctttgaattggtgcatctgattgccaacgccagccttgaggtacagctttattactttcaattggaaaacgctgagcaatttggtttaaatcacgctgaatagtccttaaactgatttcaataccttcacgctcaagcatttcttgcaattctcgagttccgatccatttaccggtaggaaggcgagatagaatctgccattggcgatataaactatttgaagtttctttttctgttacagacataagcgtaatacatctatatccaattgctttggtgtcaacacaataaaaaaactttacagatttagcaagtttgtcagattcggtttatagcagcttttacaatcaatgctaaaatttagaagaaagttataacaatgatattcaataagcattatagatatataagtggcactgaaattgcttatttaaaaatgaaatatagataaatgataagacgaggttgctatgtcagaacaagagaaagacctacaagccgatattgattattttatacaggaacaggcgaccaacgcattacttaaccaaacttcgtttatagaaaatctttccgtacagtcgaacctatttgaacaactaaaatcgcagttttttaatgagatgttggatgatgcgacgtctaatggtgtggcctctaaaaaaattgaacaatggctgagcattcgtactttggatgagttgaaacaattaaatgcggaggctaagcaacattttctctatcacggcattacatttaacgtatacggtgataaggagggagtggagagaacgataccttttgatctcattccaagggttattgaaaaaaaacagtgggaaaaaatcgcagctggctgtgcacagcgagttaaagcgcttaattattttttagatgacatctatcatggtcaacatattttaaaagagcaattaattccggaaagtcagattatttgtcatgaggcttttcagccccatatgcttaaacacacgctcaaaggcaaaatttattctcaaattagcggaatagatattattcgtgacagtgaaggcgagttttttgtacttgaagataatttaagaacaccatctggcgtatcttatatgattgaatgcaggaatattagtcaacaactcatgcctgagctctgtgctgctaacaatctgcaaggtattgaacactacccaagcttattaaaagaaatacttcaagaaaactctgagattgatcagccttttattgtggtcttaacgccaggacgttttaacagtgcttattatgaacacgcttttttagcacgtgaaatggatgtgccactggtcaccaatcgagatttatttgtagaaaatgatcaagtatttgtaaaaacgattcgcggccgtcaaaaggttgatgtgatttatcgccgtttagatgatgattttttagatccacttgcatttagacctgatagtgctttaggtgtggcaggtttaatgtctgcttatttacagaaaaacgtagtgattgccaatgctcccggcactggagtagctgatgataaatcgatttatccatatgttgatcagatgatccaatattatttgggtgaaacaccaattttgaagaatgtacctacttaccagtgccgtgagaaagaacatctggactatgtactggctcatttagatcaattggtcattaaagaagctcaaggatcgggtggatatggcatgttaattggtcctaaagcaagctcatgtgaaattgatgaatttagacaaaaactgcttgctacaccgcatgaatatattgcccagccaacattggctttatcggttgcaccgactttaactacagcaggggtggctgagcgccacatcgacctacgcccgtttgtactcagttctccttatcggaccgaaattgtgcccggaggtttaacacgagtagccatgcaggcaggttctttagtcgttaactcctcacaaggaggaggtattaaagatacatgggtcgttgaaacgctacattcttaatggttggttaaagaggaaatttatggttttactcaattcgagtgcgcaccacatttattggttgggtcgttatttaatgcgaattcaatttgctgtatcacatttgccatttacagatgatgctaaagcagcccaatttgcagcagcatttgggctagtcattgatcaagcagaattactgaattgctatatgttggatacgaaacaaacatattcattactgaatcagttcgctattgctaaagataatattcaagagttaagaggaatattatcttcaaatgcctatgcagaattaaatcatgcgattaagggagtccaagctcatcctgattcattaaagcaggctttagcgaaatgtaatcaaatacttgatactgaacatgaagatatagcgttatttctgcatttaggacaaaagatagaattatttgatatacgactacgttttcagcaagaccttacacagctcttgcaggagttagaacaattacttcaacagctgaatgacttagggtggaataaattaactcaaccatggcaattattaaaagatcatccaaattgggaagcttattataattttacccagcagttggaatatatgttcgaggcataattatgaaattgatggttaatcatcaaacgcattataactatactgaaactgctaaaaacagtattcagtatatcaagatgatgcctcaaacatcgctgcatcaacatgttatgaattgggcaatcagcgtgcctggtgacaagacgctcaaaagagatatttttaataatatttggataacggctagccagcgttatgagtatcagcaccttacttttatggcacaaggtattgtagagcttctaaatacagaaataggaggagtagatatatctataccaataaatctatttctccaaagtacagaggccactaaatatgatgctgaaatgttggattttgcccagagaattgtaactgtcaaagatcgacaacatattgctttgctcagtgaaaatattttgcaaaagatgccatatcaaccggatagtacatctgttcatacaacggctacgcaagcctttcaggcaggtcagggggtgtgtcaagatcatgcacatgttttaatcgctatgtgccgtgcgttacaattaccagcacgttatgtctctggttatctatttgatcaaaattctccacaccttgccagtcacgcttgggcggaggtatttttagataatcagtggtattgttttgatgtgagcaatcaattgtttacaccaaagcatcatatttatcttgctgttggtcgggactatctcgatgttgcgcccattaggggagtgcgagaaaaaggtggtactgaaaatatgatgtctgtggttcaagtgctggcttgttgaatgtaaagagaacgaaatgacctattgttgtgcgctgagattggaacagggtttggtgtttataagtgacactcgaactaatgccggggtcgatcatatttctgtgttccgtaaactgcatacttttggagtaacgggagagcggtttattgccttgcaaacagcaggcaatttagcaactacacaagcggttatcgggcatttgcaaaatgcacttattttgcaacaagagcctaatttatatagcattaatactatgtttgaggtggctgatctagtcggtaaaaccttgaaaagcgttttagaagatatcagttcagatacccaagaacaaatgaattatgcctgtagtattttagtgggtgggcaaatcaaaggcggagatatgcagctttataatgtttatccgcaaggcaattttatttgtgccaccacagatacgccttactttcaaattggcgaaagtaaatatggcaaacctattttagatcgagctttatattatgcgatgccattagatgatgctcttcgttgtagtttaatttcatttgattctacattgcgttctaatgtctctgttggtttgccgttagatgcattggtttatagtaaagatagttttgtgatccctatgggtaagcgaattactgaagatgatccatatttttcacaaattagtcgtcaatggtcagatacgttacgccgtggtttacaggaaatgccaaaacctacagatgattattggcgctaaaatttattcaaaaaaaatccaagcagtgcttggattttttatttagtgaactttaagtaccctgacggactgggcgagaacttagacggcaaagtaattcatagccgatcgtgccatttgcttcagccacatcatcaactaaacggtgatttccccaaagttcaacttgggtgccaagttttacttgagtatttgtgacatcaatcgcaatcatatccatacttacccggcccacaactgggcaaagtttgccatcaatagcgacaaaattttgcttaacataagctcttggataaccatcaccatagccaatagaaacaatggcgatatccatagcctgttgagcacaaaaagtagagccataacctacgtgttcaccagcttcaatatggtttaacgctattatttctgcagtaaaagtcatgacaggtttcaaatcaagatcatgcactgttttatctgcaaaaggtgaagcgccgtagagcataataccaggacgtacatagtcaaaatttagttctggccatttaaagatggcagctgaattacagcatgatgctaaaattggatcgcaagtttctttaatatgcaaaaattgctgtttttgttgttcatttaaagggtgatctacatctgcatttgcaaaatgcatagcaagtacacatgtaaaaccttcagactttaatgtcttaatcacttcaataatttctgggtctttaaaacctaaacggttcataccgctatttaatttaacccatacttttaagccttgggcaatatatgcttgtttgtgtttaattaaccattcaaactgttgttgatggtgaatgacgcattcaaatttttgttcaattgcgacgggcatttcatcttcagaaaataccccttcaattaaagtaactggttgttcgaaaccgagttcacggatttctaatccttcttgtaggcaggctacaccaaaggcatctgaggcatttaaggctgctaaacagtctttgactccatgtccgtatgcattggcctttaccatgcttacgatttttgaatttgctgcgagttgtttgacacggtttaaattatattgaagcgcttggcgatcaatataaactgttgcttgacgcaccctcatttactcctttgggctagagatagagtttattcttcatcatcatattggctgtaatactcaggagagagattactaaaacgagtatattggccttcaaaggcaaggcgaacggtaccaattggaccattacgctgtttaccgatgataatttctgcggtgcctgcttctttcgattctttgttatagacttcatcacggtaaataaacatgattaagtcggcatcctgctcaatcgcaccagattcacgtaagtcagacattactggacgtttattcggtcggttttccagacttcggttaagctgagatagtgcaatcacaggacagttcatttctttagctaaagcttttaagctacgtgaaatttccgagatctcaccaacacggttgtcacccatgcccggaactttcattaactgtaaatagtcgaccatgatacagccgattttaccatcatgcatttttgcgatacgtctagctcgggcacgaacttcagtaggtggtagggcagaggaatcatcaatatacaaatgcatttgttgaagttgcagaatggtacccgttactttagtccattcatcagcatccaaattacctgaacgtaaatgcccttgatgcactttacccatagctgaaattagacgcatcgcaattgagtctgctggcatctccatagagaagacgagagctgggagtttattgtattgtaaaacactttcaaccaagttcatggcaaaagtagttttacccatagatggacgtgctgcgacaataatcaaatcacccggttgcataccagaagttttattatcgagctctaaaaagccagtcgttaaaccagtaatatttccgtctaattttgaaagttcatcaagtttactaattacatcggcagttacagaactaattgctttaggaccagaatcttttttattgttgttatgttgttctgctaaagagaaaatacttgtttcggctaaatctaaaatttcacttacacctcgaccttttgtgtcataagcattttgtaaaatttcagtacttaccttaatcatactgcgtagtgtagaaaattctttaattttagtcgcataagtttcaagattatagaaactcgaaggtgagtcagccataagctgcatcaaatattcttcaccgccaatcgcatcgagtaagttttgttttaaaagccagtcgttgaccaaaaccgcatcatacggtgagttttcctgtgctaatttttcaattgcacgataaatatatttatgacgagtggcataaaaatcattttctttgagtaagtcactgacttgttcaaaagattcagcaacagtcatcagcgcagcaagtacagcttgctcaatggctaaattgtgtgggggagtgcgaaactctttaagttggcctgattcactcgtcttattttctgttggagatgaaagggttaaagaagtggcattcgcctgagacataattagacctgatgataaaatgtgtacacaaaaagggttttaagccgagaactatcttaaaacaaaactaaataaactacctaattaaaaaaccaattaaactgaagaactgatcaggaattaatatatctaattttattgcttaaatttaagagataaaaaaagagcatgcgtaagcatgctctttttttgatgagaaattactcagatacgatagtaacgagaacttctgcaacaacatcatggtgcaattgaattgcgatgttgaattcaccagtgtgacgaagcgcaccgtttggtaaacgaacttctgcacggtcaactgtaagaccagcattcgttaacgcgtcagcgatgtcacgagtaccgatagaaccgaagagtttaccttcgtcaccagctttagcagtgataacgatgttaacttcgttcaattgttcagcacgtgcttgagcagcagctaatacttcagcttcttgcttctcaagttcagcacgacgagcttcgaaagcagcagtgttagcttcagtagctgcaactgctttaccttgagggataaggaagttacggccgtaaccagctttaactgatactttatcgcctaatttaccaaggttcttaatgcgttgtaataagataacgtccacagatcacctcacttatggttgtcagtgtacggaatcaaagacaagtagcgagcttgtttgatagcaagcgctaattgacgttgataacgagctttagtaccagtgatacggctaggaacaatcttgccgttttcagtgatgtactgttttaaagtatcgatatctttgtagtcgatgtacgcaacattctcagctgtaaagcggcagaacttgcgacgacggtaaaaacgtgccattgatgttctccttattcagcttcttgagcaacttgctgtgcttcttcacgttgagctttacgcgcacgcttttcttcagcactcttagcaagcaatgactcttcagtgattgcgtgttcacgacggatgataaggttacgaatgatcgcgtcgttataacggaataattcttctaactcatcaagcgtagattgaccacattcaacattcataagaatgtagtgcgctttgtgaattttgttaattgggtaagccaattgacgacggccccaatcttctaaacggtgaatttgaccatcagcttctttgatctgagagatatagcgttcaaccatacctacaacttgatcgctttggtctgggtgtaccaaaagtacgatttcgtaatgacgcattgtcagctccttacggtttaaacagcccctaataaaattagaagcaaggagtcatagctaaaaatataaatagctacgtcgcaaaaaatgcgaaggctgaattataggtaaaaattagactaaaaacaaatcttttgatgagaaatataaaagttatttgagagaggaggaaatcctcccttaattaaaagagaggaagatttggagcaggggattgataggtaaagctaaaacttaaacttagcaaagtaattaagattactgagtaaaggaaaaagcgtttagcccaaagttggtcgttttcagctttaaatccaataattgataaataaaaccagtatgcggtcaaagcattaaaggtaatcaagaaaaatacattggtgtagccaaaacaatataacccattcaaaacagctgcaaacaacaggatatagattacacattcaattttcgtgcgataaatggaacgtgctacaggcaagataggaattcccgcatttttgtaatcatcaaaacgataaattgcaattgcccaagagtgaggcatttgccataaagcgtatgctaaaaacaaaagcaaggctgccacatcaaattgatgagttactgctgtataaccaataacaggagggctcgctccggagatactaccaatgacggtttgatggattgaggtacgtttagtccacaaactataaaaaccgacatagacaataaaaccaatcattgcaaacaaaaatgcgtaaccatttacaccaaaccacaaaatgctaaaacccattactccgagtacgaaagcatatacaagcgcaacagtaggagagatggtttttttaacgagtgcacggttttgagtgcgctgcatctttgtatcaatatcttgatctataacattattaaccacacaacctgaagcaacaactaatgttgttccaatgagagtgagcaataataataagatgtctatagagccttgggcggctaagaagaagccgcccaaggtggtaatgaaattaccgaagagaattcctggtttagtcaggaataaatactttttcaacatgacaatcagtttagatcatcatattgtagtgaaggtaattcataatccacacagaaccgattaaaagtacagcgatacataggattgtgtagataaatgcaatcatattccaacgttgttcagatgatgtattcatgtgtaagaaatacacaagttgtacaagaacctgagcaacggcagtgattgcaatcactgtaaccaaaagaccgcggctgaaaccacccgccatcaccatcccgaatgggatgatggtaaggatgacagaaagaataaagccaacagtgtattgcttaaagttaccgtgtgacgcaccagcagcattatgctcatgactactcattagagaactcccagtaagtaaacgacgctgaatacacagatccaaacgatgtcaaggaagtgccagaacaagcttaagcaagcaagacgacgtgtattcggtaaagtcaaacctttagttttgatttgatacatcagtaccaacatccacactaaaccagaagttacgtggataccgtgcgtacctaccaaagtaaagaacgatgataagaaagcactgtgtgttggaccatgaccttcttctacaaggtgatggaattcatagagttccatcccgatgaaggttgcaccaaaaaggaatgtaataaataaccaagtgatcacttgatttacattctttttataagatgcaagtaccgcaaaaccgaaagtcaccgatgaaatcaataaggcaaatgtttcagttaacacgtagcctaatgattcatggaacaggtcatatgcacttggagttcctggtggaacatgactgcttaatacagcgaacgcaatgaagagtgatccgaaaagaatcaagtcactcatcaagtatgtccagaaaccaaagaccgttaagtcagtatcatcatgttcatgatgaccatcatggccgtggttgtcgtgatgaagtacttcagccatttccttagtccttcttcaagtgtttttcaagtaaagcatagcgttcgttttcaatacgctcaacttctgcagctggaacatagtaatcaacattcttagtgaatgagcttacgatcaagctaacaacagctgcaacgaatgaaacaacaacgagccaccaaatatgccagatgagtgcaaagccaagaagagtaatgaacattgcaatgacaaaaccagcagcacggtcagtcggcatgtggatgtcttcatatttagtattacgtgcgtatgctacaccgttttctttgtcagtccagaaacggtcaataccgcttgcatctggttcatgagcaaagttatagaatggagcaggggaagaagtagcccattcaagtgtacgagcatcccatggatcgcctgtgtagtccatgttttggtgacgttgtaagaaaccaacgatgatttgcattaagaaacatgcaataccaatcgcaacaagaacagcaccgaataatgcaatcgcaaggtatgggtcccattcagggttgtcatatgtattcaaacgacgagtcatacccatgaaaccaaggatataaagtggcatgaatgcaaaatagaaaccgaagaaccagaaccagaatgcagctttaccccatgcttcattgagcttccaaccaaacatttttggccagtagtaaatgatgccggcaaacataccaaacaccacaccaccgataattacgttatggaagtgagcgatcaagaataatgagttgtgtacaaggaagtccgcaggtggaacagccataagtacaccagttaaaccaccgataccgaatgttacaaggaagccaagcgtccataacattggagtagtaaaggtgatgcgacctttatacatggtgaataaccaagagaagattttcacaccagtaggaatcgcaataaccatggtcatgataccgaagaacgcgttaacgttcgcaccagcacccatggtgaagaagtggtgaagccatacaacaaatgctaatacagtaattgcaattgttgcatataccatagacttgtaaccgaacaacgctttacgagagaaggttgcaacgatttctgagtataaaccaaatgctggtaataccaagatatatacttcagggtgaccccatgtccagatcaagttcacataaagcattgggctaccgccaagctcatttgtgaagaaatggaaaccgaagtaacggtctaatgtaagcatcgcaagagtacctgttaatacagggaaagatgcaatgattaatacagccgtacaaagtgaagtccatgtgaaaataggcatatccatcaatttcatgccaggcgcacgcattttgatgatggtaacgaagaagttaacaccagataaaagcgtacctagaccagaaacctgaagtgcccagatatagtagtcaacacctacaccaggagaatattgaataccagacagaggagggtaagccatccaaccagtcgcagcaaattcacctaatacaagtgaaagcatcattaaaccagcagcaccagcgaataaccagaagcttaaagagtttaataatgggaaagcaacgtcacgagcaccgatctgtaaaggtacagagatgttcatcatacctacaactagacccattgctacgaagaagatcatgattacaccgtgtgcggtgaagatctggtcgtaatggtcaggatgtaaataaccttcaccaccgcctttagcgaggaaaagttgtaaacgcatcatgatcgcatcggcgaaaccacgcaaaagcatgacgacagatacgatgatatacatgataccaatctttttatggtctacagttgtaaaccattctttccacaaatatccccattttttgaaataggtgataccgccaagcacagcaattgcaccaagtgccataaagaccatggtgacaagtacgattggctctgtcgggatagagtcccaacccaatttaccaaaaatcatatccatgtcttattccccttgagcagcgtgttcagctgcaacatgagtttctgctgttgtatgtgcagcagagtggtcagcaccatgatagttactcatatagtggttgataattgtttcaaacaattttggttcaactgaagagtaataagtcacagggtgtggcttagtcgggaacggtttcatcgcttctgctttagcaagcgcttcttgatcaccagcagctttagcacgatttactaaatgctcgatttggtgcttagaacgatcgccatcacgtaaggttgccaattcagcttggtcaagcgtagttttttgaactgcttctgggttaatagttgtaccattacctgctttaacagccgctacccattcgttgaattgttgctctgtaacgctatgcgctttgaaacgcatttgagagaaaccatagcctgagtagttagaagagaaaccacgatatacaccagtttcatttgctaacaaatgaaggtgagtttgcatacctgccattgcataaatctgaccgcctaactgtggaatgaagaatgagttcatcgtgaagttagaagtgattttgaaacttaacggagttttctctgggaaacgtacttcgttaacagtcgcaatgttttgttcaggataaataaaaatccacttgaactgttcagcaataacctgaatagttaaaggtgctttatctgattctaaaggacggtatgggtcatacttgtgggaaccccaccaagttaaccaagctaaaataccaataataatgacaggaataccccatactacaacttcaattgcagttgagtgtgcccatgtaggtttatagtctgcatctttatttgacgcacgatatttccaaccaaaccataatgccatgatgattgaaggaatcaccacaagtaacattaaatagatcgcagtcatcataaggtcactttgaccttgaccaactggacctttagagtttagaagtaccatatcaccaccacacccagtcaaaagtgcggcaagcgttgataaagacaatacagctaaaatcgtttgtctcattttacaacctcggtgaagagtcccattccctaattaaatatgggatagcgattaaagtgtcgcatgattgagaacgctagtcttaaaaattagacttctcaatgatgtgacaccgctacgttgtagggcattatgcctcatatcgacaaactaagctacacataaagtcgtctgaaataattgttttaaaacccgattttttttgtagggtatctaatttcaacagagcttttatttaaatatcaactctctatggaaaaaaaggaggcgaggtgcctccttttttttagacattaaatgaatgagtcatttactatcatttgatcacttttgttcttgcaattttgtcatgtagagcttgtcgcttttgtcctaatgcaaaagcatagtcaataattgtactaataggcataaatagtaagtttaatataatgaaaacgacacttcttagaaggaagatacgcgttaaattaactttaccattggtttcggcatcgacaattctaattccgacaatttttttaccaatactttgcccaaacttagtcaataaaaatgcttgaatagcgagcattatgacgacataaagtagcattgtatgccaagcttctataggaataagggtaaaaagctgctgttgaagttcagctgctttagttgatgcaacttctgcagattgcatctgtttttgtaactcaaaaagttgtttatattgagcttcattaaagaaaaaagacggaatagctgcaataggtagccaaagtaataagtcaataatttttgcaagagcacgagacgaaattgaagcaagctcgtgtgttttagtttctacacgaatgtgctgaatggtctcattataaggcgtatttgtatttgctgaaaaagcagaataaccagtaggttgatatacaagtttaccttgggttaattctcctaaagctttccattctgtcatgccttcatgccaagctaaatcagtaagcaaaacttgttgacttgccaacatttgatttagttgttctaaggtataaggcccagcttgttgattattacgtgccaagtaaatttgcataagtaaaaattctctattctaaagatgaaaaaagacccacggatgggtctttttttataacaaattagatttgcttgattttttcttcagcaaggaagaaccatgtgtctaaaaccgagtcagggttaagagatactgattcaatgccttgctccattaaccattttgcaaggtctgggtggtctgatggtccttgaccacagataccgacatatttaccagctttacgacaagcatgaattgccattgaaaggagagcttttacagcagcatcacgctcatcgaacaagtgagaaacaataccagagtcacggtcaagaccaagtgttaactgagttaagtcgttagaaccgatagagaagccatcgaagtgttcaaggaattgttcagctaacaatgcattagttggtaattcacacatcatgatgacttttaagccattctcaccacgcttcaagccattttgagctaataactcaatgacgcgttttgcttcagacactgtacgtacgaatgggatcatgatttggatgttagttaaacccatttcatcacgaacttttttaagtgcgcggcattcaagttcgaaacagtcacggaaattgtccgaaacataacggcttgcaccacggaagccaagcattgggttttcttcttctggctcgtataacttaccgccaataagattcgcatattcatttgacttaaagtcagacatacgaacaataactggtttgtcagcaaatgctgctgcaagtgtagcaataccttcaactagtttttcaacatagaattctacaggtgatgcataaccagctgtacgggtcattaccgcagcacgagtttcgcgaggcaagctttcaatgttcagaagagctttagggtgaacaccgatcatacggttaataatgaactctagacgagcaagtccaataccttcgtttggaatttgagcaaagtcaaaggcacggtcagggttacctacattcatcatgattttgaatgaaagtttaggcatagattcgatagagttacgttgaacttcaaaatctaacgcgccttcgtagatgaaaccagtgtcgccttcagcacaagaaacagtaacttcttgaccatcagtcaatacttcagttgcgttaccacaacctacgattgctggtacgccaagttcacgggcaataattgcagcgtgacaagtacggccaccacggttagtaatgatggcagcagcacgtttcattactggttcccaatctgggtcagtcatgtctgatacaagtacgtcaccgtcttgtactttgtccatttctttaattgagttaacaatacggactttaccagaaccaatacgttgaccgattgaacggccttcacaaagtacagtacctttttgcttgagtaggtagcgttccatggtgccgacattttgacggctctttacagtttcaggacgagcttgaacaatatagatttgaccatcatcaccatcttttgcccactcgatatccattggagcgccatagtgcttttcgataataagcgcttgtttcgctaactcttgtaactcgtgatcatttaacgcgaattgttgacgttcttgtttttcaacgtctacaactacaacagatttacccgctgaaccttcttcaccataaatcattttctggtgcttagaaccaaggttacggcgtaataccgcatgtttacctgcatttaataatggtttagaaagatagaattcatccgggttaacggcaccttgtacaaccatttcacctaaaccgtaagatgcagtaataaatacaacatcacggaagccagactcagtatcaagggtaaacattacgcctgcagcgccagtttcagagcgaaccatacgttgaacaccagcagaaagcgcaactagactgtgttcaaaaccttggtgaacgcgatatgcaatagcacggtcattaaataatgatgcaaatacttcttttacagcaattaatacgttatcaataccgcgaatattcaagaaagtttcttgctgaccggcgaacgatgcatccggtaagtcttctgcagtagcagacgaacgaacagcaacagcaatatctgggttaccatttgaaagtgcagcaaatgcttcacgaatttcttgttctaagccaggtgtaagtggagtctctacaatccattgacgaattttagcgccagtttctgctaaggcatttacatcgtcaacgttaagctctgcaagttctgcttgaattcgagcgttaagaccgctttggtctaagaactcacgataggcatcagcagttgttgcaaaaccaccaggtaccgatacaccagcatttgataaatggctgatcatttcacccaaagatgagtttttcccacctacgagttcgacatcgtgtttccctaatttttctagaccgattacgcgcgcttccaaagttttcactccacttttgcagtattaatgtctatcttggcatgaaattaaaaaataaagtgcttagttgagaattttactaagcgacagtcatgtaagatcagtttactataaagattatatagcactaagacaaatgtttaaggagaattttaatgtcagaaagtaaacaatttaagcggagtgtttttttatttctgatggaactgcgattactgccgagacccttggacattcgttattagctcaatttcctaacgtagattttgatattcacatcatgccttatatcaccactgaagaggccgcaatggcagtggtggtcgagattaacaagtgtcagaccagagatggttgcctgccattagtatttgatactttggtcgatccgcatgtgcgagaaattattaatacggctaaagcggttaatctggatgtgtttgaagggttaattagtaagctggaacaggagcttggaaccccgcctacaactttagtcggacagactcatgccgtgaccgattcggagtattacaaagcccggattgatgctgttcattttgcgcttgataatgatgatggagcacgtacccgccattatgacaaagctgatttaattttaattggcgtgtctcgttccggtaaaacaccgacttctatttatctatctttgcaatttggtatccgtgttgctaactatcctttaaccgaagaagatttagacgataatcgtttaccggcagtcttaagagagcaccgcagtaaattatttggtttgatgattgatgcagagcgcttggttgccattcgaagtgaacgtaaagcgaatagccgatatgcaagttttagccagtgtcagatggagttgcgagctattgaaggtatttatatttctgagggaattaaatacttaaatgttaccgaaatgtcgattgaagaaatttctactcgtattttacaaatgacaggtttaaaacgtcgtattggttaattaagtcaattatttattttaaccattcaatttaaaatttattaatatgattaaattgaatggttttaaatataaaacaaattaaaaataaaagttttaaatataaaactgtttatataaaaatgtttttgattggttaatgttaggtatgttttgtgcaaattaaatatattcaaaaagaataattttgaaaagaaatgtatataaaaaaataatctatatttttataaatgtttgtttttaggtggcttttaaaaaaacaaatactttttttctccatatttattatttgtgattaaagttgctagttatttgattattgtgatgtgtgtcacatttttaactatactttcccatctcgatatgggactattcgattctcaaaatgctaaagaaatgtgttttttcattggtctatctcttgccaattcatttatacgctgctcaggttgatgtattgcgtgagcaagctattcaaaattatagagcaggacaaactcaacaagctgtatctcaactagatcaattgctaaataaatacccgcatgatcaaaagctgcttgctgattatctgtttattatgtcaagtgaaaaaagggatcttacaaatttttcacggtttttggtaaatattaattatgtagactttccagaatatgcaaagttacctttaattcaaaatttccgtgattttaagcattttaaaactgcaattgactggtcaaataagttcaatattcaaaagtcagttgatggccgtattttattatcggttttgtatgctgaagctcaagatgtggcgaatgctaaagatcagttgtcgaagatcgatattaaaggtttaactgctgatcagttggtacgggttgcatatgcttatcgtttaataaatttaccagtagatgctttagctacagttgagcatgcttatcaacaacaaacaaaatcttcatccgttttacaagaatatgtttacgatctaattgctattggctcatataaaaaggcacagcaattgctgcaagcgagcgaaaaaactgaacaaacagtgcaaatgttgcagactttacaagttagtgagttttctcaacatatcaacaatgcaattgctcgatataaatatttaaatcgtgaaggactagccgatgccgaaagctttgctgaattagataaagtgctggagcaaggacaaaaaatacatcagcaaatgaatccttccgatcctaattacttacggttttattacgattatttatatggattagattttagagggcgttcaaaagcagttatagagaattccacccagttgaatattccactcgaaaaattaccggcatatgtacgtcatgcaattgctgatagttatttggcggagcaaaaaccgaaaaaggccgagtttgcttataaaacgcttttaaccgaaaagaattatccggatatgaccgtttatacgggactgtattattcttatattgaacaagaaaaatataaggaagctgaacaacttctcgctgaagttgatcggcttattccaacttataaatatagtcaggctaagggtgtagataaaatcagccatcctgatcgtgatgattatattgctttacaaggaatgcatttagcctacgctaatcatctggatcaagctgaaaagcattttcaaaaaaaagtagagcaggcgcctgcgaatgagagcctgattaataatcttgcgcgtgtagaacgttggagagaaaaaccgctagaggcaaaaaaaacactttcccggttaaatggtatagatccgattgctaaagacacccgcattaatgaaatgcaaaatgctcaagctttaggtgatattccgacatggcgaaaaaccactcaaaacttagtgcaatattaccctgatgatagtggggttattaaaagtcgaaaagaattagaagatcgtaatagagccacaatttcacactcaaccacttggggccaaagtaaggccgaaggtcgcgatactgtaagtgagcagaatggtttaaaagaccgtgaaatggaaacgcgtcttaatagcccttggattaatgataattatcgtttattcgcttggcatcaagatcgttatggtgagtaccgttttggcgatgtgcatgaccagcgttatggggtcggagcagaatggcaggcgaaccgtaaggcgttgtcagcaattgtgtcgcaaagtacggatggtggacaagcaggagtccgtcttgattggtcccaatggctaaatgaccattggcagtatcaattgcaatataacagtcaggctgacattcctttacaagcccttgatgcaggggaagatggtcaatcttaccgagctgctgtcacatggcaaaaagatgaatctcgccagattggcgcgagttacagtttaactgatattagtgatggtaacaaacaacaagaattttcaacattttggcgtgaaagactattcgacgcacctcatcatattacttatggcactgttcgaggtttctacggtactaacagccaagatcaaacagcttattttagtccaagttcacattacagcgctgagttgaacttaagtcatgactgggtgacttggcgtgaatatgagcgttcatttaagcagcattttgaagcgggtgtaggcctttataaacaggccgattactctgctaaacctacttactctttgcaatatcaacatcaatggcagctatcccggacatggcagctcaattatggaattggttggcaataccatccttacgatggacatgatgaacaacatacctacggtatttttggatttgaagggcgtttttaatgaataatttattgtcgaaaatgttgggctgtgccttggtctcaacattgttgcctctgcaatttgcatatgcccagatagaaaaagatttaccaaaaaatcatacggtttctttaacctttcatgatgtgagagatggtgtcttaaaagaaggtgatcgggatatttatgcaatccaaacgaaaaatttagcacagttctttgactggttaagtcaatctgactggaaaccaattcgcttaaaagatattgaagaagcacgtaaacaaggtaaggaattacctcataattctattttgttaactttcgatgatggcgctttaagtagttatagccgtgtatttccattacttaagcaatatcagattccggcagtatttgcacttccgaccagttggctaaatgggaatacacaagctggttatgaagcttatgggcaaggaaatctagtcaattggaagcaagtgcgagaaatgcaagcttcgggcttagccgagtttgcaagtcatagtgatgatttgcatcatggagtattggctaatcctcaagggaatgaacagcctgctgcgacttcttacacgtatttaaaatcccaaaagcgttatgaaacggatgtggaatatcaacaacgtattttgcaggacttaaaaaaatcatacgccgttttaaagaaagaagtgggtgttgaacctaaggcaattatttggccttacggtgctgtgaatgagcaattagaaaaattgtctcaagaagccggctttattttttctttcagtttaggacgtgatggaatgaatagggtgagtgactcgacttttaaacgtagtttggtcactaataatcctacagctgagcaattaacagagggtatgatcaatattctcaactttgaagaattagatttatttaagcaacctcgccactttgtgagtatggacttaaaacaattagctgcttcaactaatacacagtcagatgagaaactagggttattgttatccaagctttatagcttaaaaaataacactttgatattgaaacctttagatgatcaagatggtgatgggcagtatgacattgcttatttcccaacaactcaactaagcgtccagcaagatattttgaaccgaactttatggcaggcacaaactcgtgccggacagtcggttattttagagttgcctgtatatcctcaaaaaaataaaccgtttttggtggtagacttagcgaaggatatcgcacgtttcaatagtaatttaagtggtattcaacttaatgctggaaccactttaaattgtgctatgcaaagcacaacaataaaagaaaatgcctgtgctgaccaattaaaacagcttacatatgtgagccagcttactcaaaaggctgtgaagccttatttaaacatgagtaatcaggctcagtttagtttattgcttacacctgattttgaacatattgaaaatttaccaacgcttttaaaaacgctgttatcccaacatgatttagtaaatcttaagttcaatatagtgggtaagcaaaaacagtttaatcacgtattagcaattttaaatacgcttgatgcgaaatataaacagcgcattatgctgactttatcattacccgaaaatagtcagcaaaatgcctggcaagaagtgaaacaaggtcttttcaatattcagcgcataggtattcagaaatttggtattgatggctataccaatgaaaactcaaaaaatgttcatgaatatttatataacccgattagtttaaattcgagttcggtcatgtatcagccctttgcaggtctcgcgactgaggggaaaaagtaatgaaagtattactcgatattttatttgcttttgcctttttatatccgttgttgatggcttggacatggatggtaggaggtctctggtttttctttaaaagggaatatcatgagcagcaactgcctgagccatcaagtgaagggtgcagtattattattccttgctttaatgaagaagctcaggtccgacaaacgattcgttatgcattacaaacaaaatatccgaattttgaagtcattgccgtaaatgacggaagtagtgacagcactgcagaaattcttgatgaactggcagctcaagatgcccgattaagagttgtgcacctggcagaaaaccaaggtaaggccgtagctttaagatcgggagtgttagtaagtaaatacgaatatctagtttgtattgacggagacgctttattacatcctcatgcagtactttggcttatgcagccttttttaaattttccaagaattggtgctgtaactggtaatcctagaattttaaatcgctcaagtattttaggtaaattacaagttggcgagttctcttcaattattggcttgattaagcgcgcacaaagaacatatggccgtatttttacagtatcaggcgtaattgcagcttttagaaagacagctttggttcgcgtgggcttttggtctgatgacaagattacggaagatattgatatctcttggaagctccaaatggaccattgggatattcaatatattcctcaagcactttgttatatctatatgccggaaacctttaaaggcctttggaaacagcgtttacgctgggcacaaggtggggtagaggtattattagaatatattcctaaaatgttcaaactccgcttgcgccgtatgtggccggtaatgctcgaagcgttagtcagtattatttggtcatatgtgatgattatgatttttattctattttttgtgggattgtttgtggatttaccgcaacaatttcaaattaattcactcatgccgcagtggtatggcgtgatattaggtggaacatgtcttgtccaatttctagtaagtttatggatagaccatcgttatgatcgtggtcggctttttagaaattatttttgggtaatttggtatccattatttttctggttactgacgttatttaccagtgttgttgcagtacccaaaacaatatttaacaccaaaaaacgtgctcgttgggtaagccctgatcgaggcttccgtggagatcactcatgaaaaatgatgcaaatatcgacgtagaagttttagatatacctgaatatattgatcagcctgaatatgtgaaaaataaaactgcaaactataccttacaaacaataggttggttttgtttaatgtggctgctttttccactcgtttcattatttttatggatttttgaagggcacctcatttatgactatgtgtgggtagatcatgtttcagaagtgaaaactttattgcatttacttctgttaataggtctgagcgcactcattttaattttatgggcaagttataactggcttagatttcatggagatgatcgtcgcagcaaggccccgaatagctctgttgagttgctggcctcacaatttatggtcagtaccgaatcattatcagaattacaaaagtcccagcgcatcatcttacattatgatgagcaggggtatttaactcgatatgatttgaaatgagtgagaaaaaaagcatggtctatcaacctatttttaaggtgtggttctaataatgatatcaacaggtcgttgagtgccatccatactataaatggctgtatcggtaacttttacaatcggccaagtttgtagtttgcaatttgctctttgcagtgcagtatagtagctatccgatttaaaaaatgttttatttgcccgtgcggtattgggcgtcaaaagtcgtttaagccatgtttcatttacttgggtttcaagaaaacgtaaagctaagatgcttttaacacgattgttaaataacctccggttcttggcaataagtggatgggtaattaatcgatgtataccgatttgactgtgaggtaaaataaagtgaggcgtaatttgaaatacagttacaaattttgcctgttggcagattttttctaaatgcgttacggtctcctgatccgttccaataatggctacatttaaatgagaaaaatcaaattctttaagttgatttgatgacagaatttgaccagtgaaggcttcaaaatcctcaactgtattttgaaaaatagctgatttagcgacattatttttaaggtcaatactcattttccaaaagtccttttggttttcatttatgatgatttttatcgttttaatataaataaccaagcaaggagtctgggtaaagtattttcagataggtggttatctcatgcttgatatagattcaaacatgagatgtcgcgtatatattaattacctgattttacttgcattaattgggtgaaactatctaagcgtttaactgtgtcgtatacatcacaagtaaaaataaactcatcgacttcataagtgtccagaagtttttgcagacccgaacgtactgtttcaactgaaccgatttgtgccatcgtatagaagttttcaacagaaagttgttctgccgtgttccataatccctgcatagatgtaactggtggcttaagtttgaggctttccccacgaattaatcctaatacacgttgataagcacttgttgccaagaactgtgcctcttcatctgtatcagcaacgacaactggaacacccattgaaacgtaaggtttatctagatattcagaaggttcgaaattctcacgataaagttcaatggcttgaccaagcatacgtggtgcaaaatgtgatgcgaatgagtagggtaagccaagttttgcagccaactgggcactaaataagcttgaacctaacaaccagacaggtacatgagtattttgtccaggtgtcgcaataatcttttggcccacttgaggtgctttgaaatattgcaagatttctacaacatctctcgggaactgatcttctgtttcctgatgtccacggcgtaaggcacgcatagtgacttgatctgtacctggagcgcgacctaaacctaactcaatacggtctggatataaagtagctaatgtaccgaattgttctgcaaccactaagggagcatggtttggcagcatgatcccgcctgaacctaaacgaatgcgctgggtatgagccgcgataaaaccaagtaaaacagctgttgccgaactcgcaattccatccatattatgatgttcagcaagccaaaaacggtcataacctaacttttctgcatgttgggcaagctctagtgcatgacgtaatgaaaactcaatagttttatcatcacgtataggggcaagctccaaaattgaaaatttagtatcttgaagtgatcgcatgcgatattctcggaaaacgttatatcgaaataatacgatataaagaagctgttgtatatcgttttttttcgatatggctttcttcctaaaataaaaaagcaccactagggtgcttttttagattgatatataaattaacgatgtttgtaccaaccacggtgtaaaccgttgtcatgacggtagttaccacctctgtaatagcggcgatcaccatcataatatctacggtcatcacgatcataacgacggtcataacggtcatcatagttacgatcttgggcaactttacgacctagagcagaaccaccagcggcaccaactgctgcaccgatatatccgccatttgtaccgcccatgtttttaccaacggtgtaacccgcgccaccgcctaaagcaccaccaatagccgcttctgtacggttacgacggtcgcttgctgcagcagcaccaccagcaccacctaaagctgcaccaattgttgcacctgatgtaccgccgatacttttaccgattgctgttcctactacactacctagagcagaagttgccgctacacgggtaccattatctgcatgagcaactgtaaccatagatgttgttgcgattaatgcacttgctaaccaaacattcattttcattgtggaactccatgctcttttcaataacgagcaatctttatgtcttgagctaaatgtaattaaaaatttcgagaaaattatgaagaaggcacatgctgatacgatagttttgtgtctgctttgtattgtttctattaatatatggataaactatgaacaactatcctagaaaccaaaatttttagttataaaaaacacccgaaggtgtttttaagctgatttcatcacggtaattagtgacgatgatgacggtgttttttcttccaatacttagaagaacggtctgcatcacggtctttagaaattttattacctaaagcagaaccacctgctgcacctaaagcagcaccgatgtaaccaccgtttgtaccacccatgcttttaccaacagtataacctgcaccgccacctaaaccaccgccaattgcagattctgtacggtgacgacggtcacttgcaactgctgcaccaccagcaccacctaaagcagcaccaattgttgcaccagatgtaccacccatgcttttaccaattgcagtaccagcgatactacctaaagcagaagctgctgctacatgagttgtgttgtcagcatgtgctacagttaccatagaagtagctaaaacagcactacataataaagcatttaatttcatcatttactccgtgtcccaagttacaggaccttaatatcttttgttacggcaaatgtaacaaaacacttctctttaaatgtggagaaccttcattcgattattggagtttagtgtcttctttgtatgctttctattaaaatagaatatttactattcacttagaaaaattaaataccatttatatatattcagtttagctagtcatcatttgaacataagaaatcaattaaagctcgggtagcagaggacatgtgtttatgctgcgcatataacaaagaaaaaggacgtgtatgacctgcatatgtattaagtataggttgtagttttccttgttgaattttttcattaacaataaagtcataactttgacatatacctagcccgctttcagcaagagttaccacacccacaatatcctcttttactaaaattcgatttgttggtatccattgaatttcctcattatcattttttaaaaaccatggggttattttgccgctactgggcaattcaaaggcaatacattgatgatgttttaattcttccaaattttttggaatacccatgcgtttcaaataagcaggtgaggcaacaagttttaaaggtgcttgctctaaaggtctagcaatgagggtgctgttaggaagttgtccttgacggatggctaaatcaaaaccctcagcaattaagtcaacgtttcgattagaaatactaatttcaatttgaatgtccggatatttcaaaagaaatttttctaataaggggggtagacgatagtgcccataagtcgtaggtacacttaatttaatttttccagaaatttgtagctgttcaccttgaaccacgcgttcagcatggtcaattaactgaaaagcatgttgcattttttcatagtaaagctgacctgcttcggtcagacttaaatggcgagtagttcttctaaaaaactggatacctaattttttctcgagtcttgtaattgttctactaatgaccgaaggcgttgtagataaatcaattgcagctgcactaatagaaagcttttcagccacaattaaaaagacttcaacatcggcaagatggtcaaattggcgagacattttgtcctcaaacgcaaaaaagatttgtgaaatgagttgtttttctacttctggggtaaaaatagaatatatccatcccagttataaatccagcaaatgcttggaatgaaggtcgaataatgaagaagttaaatcaaataatgtttgcaatgattgcagcttcggcagcattaagtgcaaatgccgctcatgtattggttgtattgtctgatgaaggacagttagagctaaagaataagcaggtttttaaaacgggtttttatcttaatgagttaatgcagcctacaaaaatgcttttagatgcagggcataccgtaacatttgccactccaaaggggaaagctccaacgttagatgagtcatcaaataatgcaatgtattttaatcaagatgaaaaagcattaaagcagtatgctggtttattacatgatctaaagttaacttctgctcaagattctcctgttgtaagtctggcgcgtattgagcaaattggtatagatcaatttgatgctatttatattccgggcggacacgcgcctatgcaagacctattaaaagataaacagcttggaaaagtacttacagctttccataaagctggaaaacctactgcattggtttgtcatggtcctatagccctgatgtcaactttacctcatgctgcggaagccgttaagcaacttgaacaaggtaaaaaagttaaaactggagaatggatttataaaaattatcagatgacagtaattagcaatcaagaagaagagcaagcgaagagcttattaaaaggcggtgagatgaagttctatccacaaactgcattagagtcacttggagcaaaatatcaaagtaatacgaaagcttggtcgccaaatgtagtggtggatcgtgaacttattactggacaaaatccagcttcggctgttcttgtcggtaaatctttattagaaaaattaaaataactatagcggttaaagaggctttataaataaagtctcttttatcatatggatttggaaagttaacgttttaaaggattacatatgttatttaatcggcataaactgtaaactatgcgctatttttatgatttggcttatcttcttatatttatctagataagttttttggacttttgagatatttcctcttatgaaagcgtcactccgtttacgtcttgatcaactctgtgatcgtcatgaagaacttactgcattgcttgcagatgcagaagtgatttccgataacaaacgtttccgtaaactgtctcgtgaacatagtgatttaactgaaattaccgaagtttggggcaaataccgtcaagcagaagaagatattgaaactgctgaaatgatgaagtcggaccctgactttaaagatatggcagaagaagaaattcaagcaaataaagcattgcttgaagaattagaaagccagcttaatattttgatgattccaaaagatccaaatgactctaatgctgcatatttagaaattcgtgccgggacgggcggtgatgaagctgcaattttctcaggcgatttattccgtatgtatagcaaatatgccgaatcgcaaggttggcgtattgaagtcctttctgaaaatgaaggcgagcatggtggttttaaagaagtcatttgccgtgtagatggcgatggtgtgtatggccgcttaaagtttgaaagtggcgcgcatcgtgtacaacgtgtaccagcaactgaatcacaaggtcgtgtgcatacgtcagcttgtacagtagcaatcttgcctgaaattgacgttgatactaacgttgaaattaacccggcagatttgcgtattgatacttaccgtgcttcgggtgcgggtggtcagcatattaacaaaaccgattcggcagtgcgtattactcacattccaaccggtacagtcgttgagtgccaagaagaacgttcacagcataaaaacaaagctaaggcgatggcattgttagtatcacgtcttgaaaatgctaaacgtgcagcagccgatgcggcaacttctgaaatgcgccgtgatttggtcggttctggtgaccgctctgaacgtatccgtacttataactacccgcaaggacgtatgacggatcaccgtattaacctaactttatataagttggatgccattatggaaggtgatctaacggaattgctcgatagtttacatcgtgaatatcaggcagatcagcttgcgatgcttgcacaggaaaatggcggctaatgaatattgctcaagcgcttgcaattcgtggtgagcctgacagttatgaacgacaggaaaatgcttggttacttgagcattttctaaaaatcaattcactcgaattaaagttcagacttgagcaagagttaacagtccaacaagagcaagactacttggctggtcttgaacgtatccaaaatggtgaacctttagcctatgtgacaggttcgcagccattttggacgctcgatttaaaagtaacgtcagatactttagtgccacgaccagatacggaagttttggtcgaaactgttttaaatctaaatttgccaaagaatgcaaatatcgtggatttgggaacgggaacaggtgcaattgcgcttgcattagcgagtgaacgtccagactggttcgtcacagcaactgatatttacgcacctactttagacgttgcaaaagaaaatgcacaaacacatggcttgcatcatgtgaaatttgcttgtggcgcttggtttgaagcactagaaccccaacaatttgatttaattgtttctaatccgccttacattgaccctgaagatgaacacatgcaagctttggcaacagagccgcgtcgtgcgttggttgcagaccatcatgggttagccgatattgaaattattattgctcaaggcaagaactggttaaaaccgcaaggctggattgcactagagcatggttacgatcagggacaagctgtgcgaaatgtatttgctgagcatggttttagtgagataaaaactattcaagactatggccaaaatgatcgagtcactttggcatgttggatttaaagttatttttgtagcgtatcacgccaacgtaacaaccaattttctataagtttcattaaggtatcggttattttacccaatagcgccaataaaataattgcaatgataacaatatctggtcgagacgtttctcggccatcactgagtaaatagccaatcccttgtgtggccgcaatcagttcagctgcaatcataaacatccacgataagcttaagctgttacgtaaacccgttaaaatgcccggagaggctgctggtaaaataatagatataattcgctgaaaagcattaagccgataaacttttccaacttcaatgagctttttatctacattatgaatcgctgcaactgtattggtgtaggttggaaaaaatgctccaattgcaataagcgtaattttcgaaccttcgtcaattcctaaccaaagcaataacagtggaatccaagcaagacttgggatcgatttaattgctgaaaaagttggttctaaatatgcttctgcctctttacttaatccaacccaaatcgcaaaaattaaacctaaaccactccctataataaagccgaatagaacacgccacgtactaatataaatatgggcaaataggtcgctatgagctaaatctaaaaaagattgccataaactagatggtgcggggagtagataagcatcgatatagccatttctgactaaaaactcgcaagccgctaaaaaaataagtggaatgagtagcgctttaaaccaccgtgtaaatttgtggtttaaatgctttttctgtgattttaaagcctgctgagctaagaagtgatttagttcagctttgttaagtgaatcactcatatactatttcacgactttttgagcaaaacgtggatctaataactgatcaaccacttggttgacattggtgccttttctaaccaagtcttcttcagtcaaaattttcccagaacgttttagtgcttgtgcttgagttgctgttggaatactttgatcaaagttggttcggctcaattgtagtttagccacgggtagaggaagtttcgattcttgagctaaaagtgctgccactttatctggattggcttttgcccattttcgggcttgttcgtaggctttaataactgcttcaaccgcttcagggctttgctttgcaaagtcttctttcacgctaagcacgctataactattaaatgctacattacgataaagcaatttggcacccgattgaatttgagctgaagccattaagggatcaagccccgcccaagcatctacttggccacgttctaatgcggttttgccatctggatgttgtaaatggaccagttgtacatcgcgtttacttaagcctactgtttctagtgattgtagtgtaaataagaaaggatcggttccttttgtagctgcaattttcttaccttttaaatcttttagacttttaatgggtgagttttttgcgacaacgagggcggtccattccggttggctttgtacataaacagttttaattggactaccattcgctcgacttaatacagcagctaatccagcagtagaagcaaaatcgatactattactgttgagatattctaatgagcggttactgccttggctgaaaacccatttaatttgggtatttggtagtgctttttcgagaagtttttgatcttttaccaccagactggttggtgcgtagtaggcgtaatcaagtttaagtgtagtcggaattgcggcaaaagtagatgaagcaaatacaaaccccaatgttgatgccaacaaagtctttggtagagaaaattttgattttaaagacatgataaaaataaaaccgaaatgaaataatagatcatcctttcatgtgtttagaggcttacaaacttagttattttgatttgtaaatcagtttgaaagataaaagtttggataaaattgtaaatctctgtttttatagtaattattaattttttaaataatgcatttatctgaaatattgaatttaaaagacataaatatcataagcttaagccctaatgccttaaacttcattcgatgtatatgttattgcttgaatgtagttaagttatctcgataagcgccggggctaacacctgtccattttttaaaagcacggtgaaatgcactcgggtcatggaaatttaagtcttcactaatatcttgtattgaatcattgcttttgcttaaacgttcaattgcaatatcacagcgaatttcatttttaatttgttgataactcactccttcatgtttaagtcggcgttgaacggtagcttctgaaatattgagctgctgtgcgacatctttgagttcaggccattcggctgggtgaagtttcaataaatgacgccgaataacaacacttaatgcattttcatttttaaagcgaactaaaagattttgtggagtttgctctaaaaaatcgtaaagcgcttttttatcttttttaacttttatatctaaatagtgcgcatcaaattcaatctgatttatctcggcattaaagtctatatcttcacaaaagcgtaccaaataatcttgaatatcgttcggttttggacaacgtaccgcaatactgtttaaactaattctttgatcaactaaccaacacataagcccatgtaccaacattaaaaaggttgcgtaggtaaacatacgtttgggttgttcttgatcatgaatcaccaaataagctttttcttgttctcgaatgagttctcctcgtatatcgtcaagcacaaaattaaaaaacttcaaaatatcgtagagtgctttttctaaagtttcagccgtactgacgagttttgtaagtaatttataactaccacggcgcatagggtgactatccatgccaaaaaactcgtcatccatggcattggcaagttctatccataattgtgcatacgttgctaccggaacacgcgctttaggtgtcataagtaattcagcaggaatgccagctttattcaaaataatttgagtatttagccctttggcataagccacacttaatgcttcatttaccagtgcaatcgaaattgttcctttacttaaagaagattgggcaaccatgtcaaagactcatttttttacgtatttcaagtgaaatatttcatgttcaaaatttggattgatcaaaagctgcaagcattttgaggttttttgaaattgtatcggaaaaaaacaacttttactctcactactaagcttaaagaacatttctataggacgttacataatgaaaattcaaggaaaacattttgtgattacaggtggtggctctggcttaggggctgcaactgctgagtatttggtaaagcagggtgcctcagtcacattagtagacatgaatgtagaagcaggtgagcagcaggcgaaacaactaggatcaaaagctgactttgtaaaacttgatgtaaccgatgaagcagctgctgaacagttctttaaagatgtgttggttaaacatggtcatttgcatggtttggttaattgtgccggtattggcccttctgcaaaagtagttggccgtgagggcgttcatgatttggggttatttgcaaaaactttaaatattaatgtcacaggtacatttaacatgctgcgttttgcagcagatgcaatgagtaaaaacacggttgaagaaggtgaagaggaccgtggtgtcattgtgaacactgcttctgttgcggcatttgacggtcaaattggacaggcagcttattctgcatcaaaaggcgctattgtggcgatgactttgccgattgctcgtgagctagcgcgacatgccattcgtattatgaccattgcaccgggaattatggaaactccaatgcttaagggtatgccacaaaatgtacaagatgctttggggcaaatggtgccgtacccatctcgtttaggaaaaccagaagagtttgctcgtttggttgcccatattgctgaaaactcttacttaaatggtgaagtcatccgtctagatggtgcaattcgcatggcagcaaaataataaaataaggatgttgaaatgattctaaatgctgaacaaagtatggttcaggagatgatgcgtaattatgcgcaaaatcagttaaaaccaactgctgcacatcgcgataagacccatgaatttccggctcaggaattaaaagacttaggcgccctaggcgctatggggatgactgtgcccgatgaatggggcggtgccggaatggattatgtatctttggtactcgcaattgaggaaattgccgcaggcgatggtgctatttcgacaatcgtaagcgtacaaaactctttgatttgcggtattacactggcatacggttcagagcagcaaaaacaaacctatttgccaaaatttgcctctggcgaatggctaggatgcttttgtttaactgagccacatgtcggttccgatgcgagcgcgattttatgtaaagccgagcgagatggcgaccattgggttctcaatggcgtaaagcaatttattaccagtggtaaaaatgctcaagtggctttggtatttgcggttacagataaacaagctggcaaaaaagggatttcgtgttttcttgtacccacgaatacacaaggctacttggtgactcgtattgaagacaaaatgggtcaacatgcttcggacaccgcaaccattacgttagaggactgccgaattcctttagaaaatttggtagggcaagagggtgagggttataaaattgcgttatctaatttagcggctggacgtattggtattgccgctcagtctgttggtatggcaagagcggcttttgatgcagccgtgcaatatgcaaacgagcgtaaagccttcggtgtagagctggttcagcatcaggcggttggttttcgcttagccgatatggcaactcagattgaagcggcgcatcagctagtattgcatgctgcaactttaaaagatgcgggactaccttgtttaaaagaggcctcaatggcgaaactctttgcatcaactatggctgagcgagtatgttcggatgcaatccagattcatggcggttatggatacgtcagtgatttccctgttgagagaatttatcgtgatgttcgtgtaagccagatttatgaaggtgcttctgatattcagcgcttggtgattgctcgtgaagtggctcaagtttagatcataaagtattgaggttttaaacttaaaactgcaagaagccgcataccatgtgcggtttcttgcaattgaaatgatgcatttttgctattagttttgtttgaaatagatggaaaagttgaagaaattttcttcgagctttagctaaaacaataacagtcaggacagattttgtggccttacacaaaatcaatcatcaaacggaatgaaggtgagcatcatgaaaactttggcagaagcttatcagcaatttgatcttacaaggctcatcgaagagcaacttgttgggcatccccaagcaataaatgcttatgttgagtgctgtgagcgttatgtaggaaaatataaaacagcgcttatctgggaagggaaaaacggacaggcagagcactatacgttcgaacaacttgctgaactttctggaaaacttgctaacttctttaaagcacaaggaattcaagctggagattgtattgcaggacttctaccaagaacgcctgagttattaattacaattttggcaacgtggcgtataggtgctatttatcagcctttatttactgcctttgaagcaaaatcgattgatcaccgaattacgactgctcaaactaaattgattgtgaccaatgatgaacagcgccctaaactgaataccttgaatgttccggttattgtaactgttcatcaaacaggtcttttatctgagcatgactttgatttttggcaatctttacaacgatattctgagcaatgtgagccagtaaatcgtagctttgatgatgactttttaatgatgtttacctcaggcacaactggacttgcgaagtctgtacctgttccactaaaagcaattttagcatttaaaggttatatgacccatgccgttgatttgcgtgaagaggatatgttctggaatctggcagatccgggctgggcatatggtttgtattatggcattaccgggcctttaagcttgggtcatggcattattatggatgagcgttcatttaatgtagatcaggcaatagaattaattaaaaaatataaagtaagtaatttaacaggatcgcctacagcatttcgcatgttctttggatttaaggaaaaatttgacccttcaattaaacaacatttacgcgtagtgagcagtgcaggtgagccattaactcctgaggttgtgaactggtttaagcaggatttagaggtcaatatttttgatcaatatggccaaactgagctagggatggtgattgcaaatcatcatgctcttgagcatccattaaaagtaggttcagctggttttgcaattcctggacatcgttttgcggtgttagaccaaaattatcaagaattgccaactggtggtgttggtattttggcaatggactcggagcaatctccattgatgtggtttaaaggttatggtggcaataatcgcaaagcctttgttggcaaatattatttaactggtgacacggtcactttaaacgaacatgggggcattgattttgtgggacgtgctgacaatgtcattacaacttcgggctatagagttggaccatttgatgttgaaagtactttgttagagtgtgaggcggtattagagtcagcagtaattggtaagccagatccggaacgaaccgaaatagtcaaagcttttgtggtacttaagcctgcttatcaagcgtgtgaaacattaaaagataagttacagcaatatgttcgtaaccgtttatctcgtcatgcttatccaaaagagattgagtttgtggacagtctaccgaaaaccacgagcggaaaaattcaaagaggactgttgaagcagcaagaaattgcaaaaatgcagcaagcctacgcaagctaatttgaacaaagggaaatatttagaatttccctttattctttatattaaagatcggctttcacttcctcgccaattaaataaaatgtgccaccagcaatatagtgcaggctacgaagttcttttggtacatgttgaaaatgccaatgcccatctctaaaaacgcggctatctgcccatgcacctacaacagaaccaataaataggtcatgagctgactgattatgtggttcaggaataagtttacataccagccatgcgatacaacctgatacaagcggactggtcagatctttttgataaaacagctcaaccccgcagtgttcaagtttttgtgggtcatctaatttgctaatggtaccaagttgcttggtcatattgagctgtgcatagcaaggaacttgtagtgtgaaataaccactttgctcaaccagctgtcgggttttagtacttttatctaaaacgaccgtcactttggcaggtttaaactctaaggcacatgcccatgcggcagccatcacgttacggtcatcaccatgctgagcagagactagtacagttggaccatgatttaacaaacgataagctttttctaactctacaggtgcaatatatgattgggacatatttagcctaagtaatacagaaaacagatagctttattgttgcagaaagtgtgagagaagtaatgtgatagggtattaactgaataaaaaagttgtttccattttatagctttcctaatgacgaacttagtcataaaatcacttggcttctaagtgaaaggattaacgtgtgaccgagcttcaagatatcgattttgtagagttaagtgatgaagaaatgcatctctatagccgtcagattttacttgatggatgggatattgaagctcaggaaaaacttaaactggccaatgtattgattgtcggtgctggcggaataggctgtagtagcgcggaactacttgcacgagcaggagtcgggaaaattaccctcattgatgcagataccattgagataagtaatttacaacgacaaatcgcatttggtcatgaagatattggacgttataaagctgaagttttagctaaacggttacagaaaattaacccttatatctgtgttgaatactttaatgaacgtttagacggacataacattgataaactagttgaacatcaagacgtcgttttagatggctgtgataactttacaacgcgttatttagtgaatgcagcttgtaaaaagcatcaggtcgcattaattagcgcttctgcaattggttttcaggcgcaaatgtttatggttgaaggtgattcagcttgttatgaatgtttgttcccgaaagaacaacatgccaatgaagggctgcgatgtgcggaatctggtgtgcttgcgactacacctgtaatgattgcgtcattacaagcacatcacactttattgtatttaggactaaacagaacgccgctaaaacaaaaactgttactttgggatgggttaaatatgacgcaacgcattgttagttttgataaagacataaattgtccactttgtcaggcaagctaatcagcaaataaaccaaaatttgctacacttgatttgaatattctggttttaaagaaatatgaaaaaaaatattttatttgatggattgcgctccgttgcccgcatcggtgaaaccgcagtagttgcggctaaagccggtattaagtatgcaactgataagccaagtaatgccaaactcatgcgtgagacttttgagtcgcttggttcaacatatattaaacttggtcagtttatcgcgagtaccccatcgctattcccacgtgagtatgtagaagaattccaaggctgtttagaccagaccccaactttaccttttagctatattcaaggtgtacttgcgtctgagtttgaagggcgtgatttaagccagatttttagttatatcgatgaaacaccactagcttctgcctcaattgctcaggttcatgcggctaaactaactactggtgaagatgtcgttattaaagtacaaaaaccgggcgttgaaaccattttgtacactgacctaaatgtggtgcattgggctgctaaattacttgaacgtgcggtacctaaaattaaatttgccgctctttctgaaattgttgatgaaattaaaacccgtatggtgcgtgaagtcgatttcattgaagaagcacaaaatttagatgactttgtggaatatttaaatatttcccaaaatcaagctgctactgcacctaaagtttatcatcagttttctacgcgccgtgttttgaccatgcagcgtttatatggggtccctttgacagactttagcgtggttaaacaatatgctaaagatccatcgcaagtactcattactgccatgaacacatggtttggtagcttaatgttatgtaagagcttccatgcggacttacatgctggaaatctaatgctgcttgaagatggccgaattggttttattgatttcggtattgtagggcagttaaaaccggaagtttggacagcatgcattgcatttatggatgctttacaaaaaactgattatcaggcaatggctgaaaacatgctcaaaatgggtatgacccataataaaattgacgttcaggttttagcacaagatctagagcgtttatttaatggtgtgttaatggctgatccacagcagattttggcttctaatccagccgatttaaacgacatcatgatggatatggtggctgttggtgagcgtcatggtattaaattccctcgagattttgccttattatttaagcaaatgctttatttcgatcgttttatgcgcgtactcgcaccttatactgatatttatgcagaccaacgtttgaaaatggttcaaaatatggaacctgcttcgttgttaaagcactaaggtcagtttaaatttatggatgccattattattgaaggcttgaaggttgagacagtgattggctgtttcaactgggaaagacaaatcattcaacctttaatgttggatttaaccatccataatgatttgagccgagctgcagcgtctgacaagcttgaggacacactcaactatgcccagatttgtgagttatcggctcaaaccattcagaaagccaagcctgaattaattgagcatgcagcacatctcgttctgcaatgtctgtttgaaacctttccaacaattgaaaaaattaccataaccatccgtaagccagccatcattgcagaagcaaatgctgtaggaattcgtcttgaacgcaccagaaataatttttgcgctcgctctagcgagtaatttagacgcagcacaacactttacttttgcttatacgcaattagcaactttggggaaagtgcagttttcatctgtttatcaaattccatgccgagatggtattggagatgattactggaactcagcgtgtctattaaaaagcaccttatcatctgaacaaattgaatcttttttaaagaaacttgagtcagattctgggcgtgttcgaccatcacatcatatttctttagatgtagatttgattgcatggggaagtgatctggaccatatgcaatttaattctaaaaaattgccgttagcactcgatgtaaaaattcctttatatgaactttgggattgtgaaaccttaaaggctgatagcacactttatccagtcgttaattttaaagtttaatgcctttcaaactaaattttacgcaaactttacgcgggttttgacttcttcaatagagaatttacgggcattttatcgatactgaaattcactaaattagtgttatttcaggacaataaagatgcttataaattctcaaatgcgcatcttgcatcagtctggcattgtcttatgccgactaaaaacaaatgatatctcttcatctctccttatttccaatttggcaaatcaagccaaggggtatagaggagaatagccatgttagaacttatccttgttttatttattgctatttttttagcatggtgcctcgctaaatatctatccaaagtgatgacaaatcagccgatggttggagatggattatttcgttggattgaaaatcctgtttatcgcttgttaggtatatctccacaacaacaaatgaattggaaacaatattctctagcatttgttgtgagctgtgtttttctagctgtggccgtttttgctatttttatgacacaagcatggctaccattaaatccaaatcatgcaccaaatatgagttgggatttagcattacacacggttatttcatttttaactaataccaatcaacagcattattctggacaagctcaattatcttatttgtcgcaaatgacaggtattgtaggtttgcaagtcattactccaatgatggggctggctttagttgtcgcgaccttaagagctttcttttatcagcgcccaagccatattgcagccgatgttgccgagcagccagaccaaattttaattgggaactattgggcagatgtaattcgccctacagtccgattcttacttccgctctgttttgtctggtctttattgctcaatagccaaggcgtaccagcgactttccgagggggaccagaagtacagctgattgataaagccaatacagttcaaacccaaaaaattcctttaggaccagttgcaccaatggtagcgattaagcaattggggagtaatggtggtggttggtatggtccaaatagtagtgtgcctttagaaaatccgacaccactttctaatttattagaaatgattgcgatattacttattccacttaccgtgatttttatggttgggcattttacccagcgtaaaaagtttgcttactttgtgtttggtagcatgcttttcatatcgattatttcaggtgcggcggctgtctggtctgagagtatgtcatcgacagcatctcaacttgccgtaatggaaggtaaagaacaacgttttggaccagccgcatcagcagtttgggcagcgatcactacgcaggtgaataacggttcggtcaatatgatgcatgattcttctgcgccgcttaccggtttagtcgaactcattaacatgctgattaatgctatttggggtggtgtgggctgtggtctgcaacagtttatgatttatctgttactcgcagtatttattgcaggtttaatgacaggtcgtacccctgaattgtttggacgcaagattgaagcggcagaaattaagttgctcgcgattattatcttgattcaacctttagtcattcttgcgtttactgcattaagcctcagcattccaagcatatctggaattagtaatccaggaccacacggtattagccaagtgttctatgaatatgtttctgcgtttgctaataacggttcaggttttgaaggtcttggagacaacactgtatggtggaatgtcacttgtagtatcgctctactgttaggacgttttccgaccttaattttgccattaatgattgccacacgtttagcagcaaaaagaaaagcacccgaaacatcaggtagtcttcaggttgaaacaccaacctttgccttaacgctgattacgatagttgtgttgcttaccttattacaatttatgccagttcttgtccttgggcctattgccgatcaacttttgttggttaaaggctaaggaggcgagtgaaaatgaatacacaaactcatgtaaatagccataaacaaaccatggcagtgccaaattttgaagtttggaaaaatgcatttgtgaaactgctaccacagcatgcaattaaaaaccctgtgatggcaattgtatggcttggaacagtggttacaggcattagtacaatcttaggttacaccacgctgatatttggtttagtggttacagcaattctgtttattaccattttatttgctaactatgccgaagctgttgcagaggccagaggtcgtggacaggcatcttcattacgtgcagcaagagaaaatttaacggctcgaagactcaactctttgacagaccgtcaagcgactcaagttgcagcgactgaacttcatttaaatgattttattgaagtacatgcaggtgagcttgttccagccgacggtgagattgtagaaggctttgcaactattaatgaatcggctgttacaggtgagtcagcacctgtgctacgtgaagctggaacagaccgttcaggtgttattggcggaaccaaagtacttacagatcgtattgttgtgcaagtgactgctgaatctggtcaaagtttcttagaccgtatgattgctttggttgaaggttcaaatcgccaaaaaactccgaatgagattgcgcttggctttttgttaatggtgatgacaatcacgtttttaattgtcgtgattagcttgccatttattgccaagtatttgcatattgaacttgattcagttgtgctcgtggcattattggtctgcctgattcctacaaccattggtggcttgttacctgcgattggtattgcagggatgaaccgtgccctcaaagccaatgttttggcgaaatcaggtaaagcggtagaagtcgcgggtgacattgatgtgcttttactcgataaaacaggaaccattacttatggtgaccgtcaagcgacctctttttatcctttaacttcggtaaccgagtctgagttgagagctgctgcttgggtaagttcacttgctgacccaacaccagaagggaagtcgattgttaagttagcaaaagagcaaggtttaaaacagcaagaacctgagcaagccgaatttatctcttttagtgcttcgactcgaatttctggtgtgaatttaccgaatggtgagcaaattcgtaaaggtgctttagatgcgatcttaaagtttgtagatgaagattattctcaagatttagagttaaaagcacgtgttgaacaagttgctaaaaaaggtgcaacaccattggttgtcgcaaatcaacatcatgtattgggtgtgattgagctttcagatgtaattaaacacggcattaaagaacgttttgcccgtttaagagaaatgggtattaaaactgtcatggttacaggtgataacccattaactgcggccgcgattgctgctgaagcaggggtagatgactatattgccgaagcaaaaccagaagacaaattggcttgtattcgcaccgaacaacaacgaggtcgtttagttgcaatggtcggtgacggaaccaacgatgcgccggcattagcacaagctgatattggtctagccatgaactcgggtacacaagctgcaaaagaagccggcaacatggttgatttagactcagatccaaccaaattacttgctgtggtcgagattgggaaacaacagctgattacccgtggtgctttaacaacattttcgttagcaaacgacgtctctaaatactttgccatcttgcctgcattgttcgctgctgcgattccacaaatgcaagtattgaatgtgatgcacttagcaagtccaaacagcgcgattttatctgcattaatttttaacgcgattattatcccgctattaattccaatcgcactccgaggcgtcaaatttaaaccttcaactgcaactcagttactacgtcgaaatatgttgatttatggagtgggtggtgtggttctaccatttattgccatcaaagcgattgatgtagtgattgttcaattatttggtttgtaatctggagtttgaaatgaaaacttatgcacaaaattcagaagcaaatttgggtcagaccttaagagcatctttcggacttctaatttttacccttgtcggctgtggtgctgtttatagtgcgattgctacaggtgcgggacaggtgttatttaataatcaagcgaatggtagtttgattgaaatagatcataaagttttagggtcaaaattagttgctcagccatttgttggagaggcttattttcatccacgtccttcagcagttgcttatgacccgatggcgatggcaggtacaaacttagcgcgtactaatcctgaactacagcaacaaattgatgctcagattcttgcggtgaaaaaacaagaccacacaggtaataaccctattccaagtgatttagtgactaaatctggtagtggtattgatccgcatattagtcctgaatctgctcagttacaggttgctcgagtggcccaagcgcgtcatttagaccctaagattgtggaagagcttttgcaaaagtatgttgaaccgaagcagtttgatgtattggggcaagcccgtgttaatgtattacagctcaatattgctttagatcaattacaatctacacattaacttaaaaataaagttgttagtttaccggatgatatcaagtgcaaagcaatcgcgaaaatcaggctgaggccttattaaatcatgtcaacagatatcaagccggtcgactaacggtctttcttggtgcggcacctggtgtaggaaaaacttatgccatgctcgcccgcgccaaagaattatttcaacagggcacagatgttgttgttggtattgttgaaacccatggaagaatcgaaactctaaaaattttggaagggttgcctcagattgctagaaaagaaatgcaatatcaggggcatattttagaagaaatggacttggatgctattttacttaggcatccgcaaatcgttttggttgatgaattggctcatcgcaacgtcccaaatagtcgtcatgaacgacggtggcaagatgttaatgagttgctagacgctggtattgatgtatttaccgctataaatattcaacatttagaaagcctaaatgatgtggtctatcaaattacaggcattcgagtaaatgaaacagtaccagatcgggtatttgaccgtattcgagatattcgcttaattgatttacccgtcagtgaactcattgaaaggctccatcaaggaaaagtctatgtaccagagcaagcaaatctggcattacaaggcttttttagcatttcaaatttaacagcattacgtgaactcgcaatgcaatgcgttgctgagcatgtcgattcagacttaaaagagagttatgcctcaaagggattgaaatctatctcgctgcaaaatgaactgatgattgcgatagatggccaaggctcatctgaatatttagtacgggcaggttgtcgtttagctgaacgctatggggcaacatggactgtagtgaatgttgctaaaagtttagactttggacagagttcgggaaattcatataaaaaagaatatattgagattgatcgggcgtttgagctggctcgacaactcggtggtcgaacagaaatcttatatggccatcgagttgcgtcagtattaatggatgccgcggttgaccgaggtatttccaatctggttattggtaaaagtatttcaccgtggtggttaaagttatttaagaaaaatttagctcagcaattattaaatcaagaaaactcgattgctttaaccattttgcacccagaacagggcactaaaaagattaatcagctcgaaaaaccttcatttttatcattaaaagaaagtgtttttgttttagctgttacatgcgcaagtatttttatagctcacttcgcagaagttctatttggtattgaagacttctctgtcatttttattatttctgttttaattgttgcaactaagacccgaatgctcgctgcagtagtggctgctcttatttgtttcttagcctataattttttctttattgccccgcgttatacctttcagatttcagcacaccaaggggtagtcaccgttgttgctttttttgcagcagctttaattgctggccgtttagcttctcagttacgccagcaagttttgtctttaaaagctgcgaatgcctacactacggtaatgcaagacttggcacgtaagctttctagtgcagtaaaccttgaagaagtcatgcaaacaggacgtatgactttagaaacccagcttcagactaaggtgtggatttctattcgagataaaataatttcatctgatattgagctaaatgataaagaaaaagtagctgcagaatggtgtttgaaacatcagcagccatgcgggcgttttaccgatactctgagtcaatcaaactggtggtttttacctcttttagagcagaaaaatagcttaggtattgtgggaatttactttaaggatgaagtggtttccttaaattttgagcaaaagaaattgactgaaagtgtaattgagtacattgcacaggcagcacttcgaacccaattggtcaatgagctagaacaagcaaaagtcaccagtgaaacagagcgcttacgttctgctttattatcttcggtatcgcatgatttacgctcgccactcgcttctattattggggcagcagacacacttgccaattttaaagctgaaatgacagaacaagaccaacaagatctgcttgaaacaattcatttagaaggtgagcgcttagaccgttatattcaaaacttgcttgatatgacgcggttggggcacgaaggtctaactttaaaaagagactggattggggtagatgaattaattggttcggcaacccgccgtttaaagcgttataaaccagatacgcaagtggtcgttcagttacctgagcaatcgattagtttgtatgttcacccagcgctggtagagcaagccatttttaatgttttagaaaatgccgcaaacttttcacctccagatgaatctgtcatgattcgtgctcaactttcgtcagaagatgaggtgaaaatagaaattgaagataaaggtgcaggaatccctgaagacgaaagacaccgcattttcgatatgttttatactatagagcgtggagaccgtggaaaattcggtacaggtttagggctaacaattgtaaaagcgattattggtgctcatatgggtacaatagaagcattttcagggcgccaaaataaaggtactttaattcaaatcaaattacccattcatccagtaaaagaataagttgcaaattcatgataagttcagaaacatcacctgtagaaacacgtattgtgattattgatgatgagcctcaaattcgtaaatttctagacattgctttaagaactcaaaaatataaaaccacgctctgcgaaacgggatacaaaggcctagaggctttggcaacccaaggggctgatttggttattttagacttaggcttacccgatttagatggaaaagaagtgcttcaggaattacgtagctggtcgaatgttcccgttattgtgttatctgtacgtgctgatgaatatgaaaaagttgccttgctagacgcaggggcaaatgactacatgaccaagccttttagtgtgcaagagcttttggcgcgcattcgtgtcatcttaagaaatcaaccaatccagcaagaagcacatatttatgacgatggttatcttaaagtcgatgtcacgcaacgtttagtttggatcgagcaacagccaattactttaactcgaaaagagtttcaacttttgacgttattaatgcgctaccaagggcagcttttaacacagccacagctcttaaaagagctatggggacccacccatcaggaagatacgcactatttacgtattttggtgggtaaattgcgcagtaagttgggagataacgcgattcagccacgttatattgctactgaaccaggtgttgggttacgttttttagctaaacagaaaaatcattaatgagatataaaaaaacccttagggtatttctccctaagggtttgcaaagtggtttatagtttttttgctctttttattttatatatcccaatgttgttctgcttcagtcatttgactgtaaatattttgatattcagcctgtttaaccgtgtaccaatgttcgacaaagtctgcccctaaatacccttttaaaataagacttcctttaaatatttttaaggcctctggttggttgttagctaataaaatgtgctcgtctggaaattttaaaagatgtgcaggttttggcagtggtaacttatgagataagccataagacgcgcccgctaaaatagtcgctgttaccaaatagggattacagtccgctccagcaacacgatattctaagcgttgattttgtacgtctgagcatggaattcggattgcaacattccggttgttagtatcccaattggcttctaatggcacgtgatgaccaattttaaaacgtctataagaattaatattaggcgctaaaatcgccatagatgcaggcattaactcaattaggccactaatcgcgctcaataatttggctgaaagctcatctttttcttctgagctaaatatattttgatggtattgattcagcatgctcatatgaaaatgcatgccactaccagcctttgccaagtttggtttcgccatgaaacaagcggttaagtcatgctttcttgcgacttgttttacaattctttttaaagcattaatttgatcgcagagttttaaaatgtcatggctgtgttgaagatttaattcgtattgtccaggggatgattccgcaacaattgcggtaatttcaattgattgtagtaaggctgctttttcaacttcatctaggacttgttgatagttatttggcgcatctatatcaaaacattggttttctgaacatgtctcgaattgatgctgaggtgagaaaaggtaaaactctagctcggcagccatgacagggaaataattattagcatgtaactgatttaataatttttttaatatattacgtggttcatagcgacagtctgaaccatcttcttcttgcatggataggtaaagctgagcatttaattctggggataaggcactgggttgcaagctgtctaaaatgggcaggcaaagtctatctggttcaccaatatattttcccagacctgtttcttcaatcacttttccatcaaggctcatggcataaacagaaagaggaaaataacatccattcgatagattttttagactcttaacgtcaatacgtttgccacgaatatgcccgtttaagtcatgtagacaaatatcaatgtgctgagtgtgaggatataaacttaaatattcatcaacttctttcaaaaaaagctctgagttgaacgtatgaatttgcgtttgtggaataaaatcatctgatattttaaatgccttaaagtgaggatcttttaagtttaaatttgggtaaatatgagtactcattataaaaaccttggtggttatttagctcaaatcctaccgtagcctttggcgttaatcccgtaaaaaaagagtaaaaagacaaagggtttttttataaataattttggatttttatattaataatcaataagttaattgttatttttgtggtaaggttttaaagtaaaattaacgtataagggccatcaaagagttgtctgatcgttcatgatttcgcttttaaaattaaacataattaagaattgtgatccttaaatttggtgagatggtcaaactgctttaaacttaaaatcttatccagttaaacatttatgtataaatcttgaattgagcaagacttatatagtgtatgtactggaattttattttttgcgtttttttaatttttatttttgagttctcttaatatgaaaaatatcggtttagccattttagcaatcagcctttcaggttgtgctgcaatgagcgtagaagaatgtaagactgcgaattggtcattagtgggtgagaaagatggttcgaaaggttcttcgccacgtttagatcaatattacaaagcatgtggaaaagccaatattgttccagatcaaaagtcatatgaacgtgggtataaagaaggccttggttattattgccagccagcaaatattttttataatgctttagaaggtaacggtaatattaatgtatgcccagttgagcagcgtaatcgtttaagaccttattatcgagctgcctcagattactacaatgcaaaagctgaatatgatcgttatgacgagaagtttaagcaatattctgatagcgcttataacgaaaaattaaagccagaagagcgcgaacgctatcgtaaacttttaagagaattacaaattgatcgtgaccgtattaacagaaactattggaactcaattcgagatatcgaacgttttaaatatgatcatggattaaaataatattttaaaaaaggattgatctgtttgagatcaatcctttgtttttttaaagataataactcgtttttgtcattaactttgaaatagcagtcatcgtgatttttactgcatatggtaattcaacaccacctgcttcaagtgcagtatgacggtgatgcaattcatcttcattcatttgctctagaattttgcgcgagcgttcatcttgagctggtaactggtttaagtgatcttgcaaatgtagactaacttgacgttcagtttcagcaacaaaacctaagctatatttatcacctgcaataccggcaagagcacccataccatatgaaaggccataccaaatcgggttcaataagcttgtatgactatttagctcttttaaacggtcttcacaccaagctaaatggtcttgttcttcaatcgctgcctgttgcatttcgcggcgtacatttggcaatttcgctgtcaatgcttgcccatgataaagtgcttgagcacacacttcaccactgtggttaacacgcattaaacctgcaacatggcgagcatcttctacaccaagttttgcttctactgtttcagctggattttggcgctgcgctgctgttgcacccggaacaagactacgtaatgcttgatcaaaagagttaataagttgatcaattccagtatagtggcgcataaattagtcctccaaagaaagatgtgctgtggcaagcattggttttagtcgggcaagaagccatatactaaagattgcactaagtacagctgtaataataaatagtattttaatatcaatttttaaaacacttaagattaagattgagaaaattgcagaagaaaccataaaaacggcatttaagatgttatttgctgcaaccactcgggcacgatgtgagcgtggtgagtaagcctgcatcatggcatatagaggaacaatataaaaaccgccactaatacccaataaagtcacagcaatcatgacatggtagtaagcccagccttgggtaaaaacatcttttaaagtcagtaatgctccagttctttcaggtacaaaagccagactggctgcaaggtagagcgcaaaaacagtaaggccaactgcaccgattggcaccattttaatattaatttctgaaccaccaattttgcggcaaagaagagaacccacaccaataccgactgaaaagaaagtgagtaataggctaaccacattttccgatgcatgaaggttttgttgagtcaactgcggaatttgggttaaataagtcgctccataaaaccagtaccatgagttacctaacaaaattgtaaacactaacggtaagcttttggtatatttgatagtttgaaagcttgtacgaacaaagttccagtcaatatctaaatcaggtgcggcaactttttgtggcaagatgaaacggctgaataaatagcctatgcaagcaatcgctactacagtaatactaatccacaataagtttccatctgatgatgcaattacggcaccccccaagatcattccgaataagatggccatggatgtaccagactgaaacagggcattgccagacatgagttcatgtggttttaagatttctggcaaaatggcatatttaatgggaccaaagaaagttgaatgtgtgcccatcaaaaatagggctaaaagaagcaaccataaatgccccaataaaaaaccggcagaaccgatgagcataataatgatttctaaaatttttatgccacggacaagttgtgagcgttcatacttatcagcaatttgtccggcagttgctgaaaaaaagaaatatggcaaaataaacaacaatgctgctaaattattgagtgtgtttactggtgcagattgttgctgaatccaaccataagtaatgactaacaataaagcttgcttgtaaacattgtcatttaatgcgccaaaaaactgggtaaaaaacatcggtacaaaccgacgtgatgtcatcagggattcatcttgtttcatcatgtgcaagcttcattgagttttataaaaaaatgtgacggagtgttaatttgcatctaaaaccatgtatgatatttttaacgcttgattaaatgaaaaatcaatggttttgagtgagttttgtcctcatattggtgcgtttattaaaaaataagtttagagtttttcatgccttctaaaattaagtttaaacagtcaactctttctcactctatgcatttaatcttaaaaatgcagagtatacctaaacttatttgtagcagcttattattaagtttatgtgttcctccttgttatgctcaaagttcggctgagaccgttacaccagaagcaaaccagacggtaacagattcattggtacaacaaactaatacaaataacccaagtgatgttccaattaccgatgtcgctactcttgtaactcaagcacagcaacaacaagatagcttggctatattgcaacaacaagaacaatttccgaatcagattgaagaatttaagccaattacgcttgataatcttgaagacttaccggttatgcctgttgaccagaatatggcaaatgaaatttatcgggtagcagaagaggcaaaaaacgaggctcaaaacttccaaaatggtacgcaaaaacaaccagaaatggtggtgaatgacgcatcacaagcagaattacatgaaattaatcaggcccctgtaaatattgaccagctcatgcatgagattcaatctgatagtaagattgtggttgaagccaatgaaacaggaaaaactttacctgagcttactgctgccgttgaagagccacccgaagaaaaaggtttctttagacgtatattcaataaaatccgtccacctcgggtaattccaatggagcagataccccgtattactgctgaggttacgggtgcgccagatgatttagctaaaaatatcaaaggtaaattatctacatttacccaagaatcatttgaagattttaatgcagcgctaccgcaacttaggagcttaagtaatcaggctgctcaagctgtaggttattacaatgctgagtttcgttttgaaaagttaagtgccagtcgcgtacgcgttaatgtaacgccaaatgaaccagtacggattaatgaacaaaacattgaatttactggtgctggtgcaaaacagccacaatttcaggtcattcgtttagttcctgatcaagatgtaggtgatatttttaatcatggcctttacgaaaccacaaaaagccgaattgtcgatgctgcatcggataatggttattttgatgcgtattggcgtttacatgacgtaaaagtgagccaacctgaaaataaagcggatattaatctcaagtatgagactggtgagcgttataagcttggtaaggttgagtttcgcatgagcgatccatcaaaaccattacctttaaatatgaatattcttgaaagcatggcaccgtggaaagagggtgatgactatgctttttggcgtgtaaatgttttagcaaataacctgactaactcacgttattttaactataccttggtcgattcaattaaacccgacccaattgaaaaaccacttgagttaccacccgatttacaagcgttggtcgatcagcagaatgttgatattgacgaatcgaagctacttcctttagagcaacaacaacttgccaaagcacgccagttggcttcctcaagtaaagaagtaacacaaaatgtggtagatgaaaaacaatttgccgggactgaaagtgtacaagccgcacccgcatctttaaaagctgcgactgtacagcatgaagaacaagagtctgaacaagaccgtttacaggctcaagctcgggaagaaaaacgtataccagtgattgtgacgttaaatgccgataaactaaatagtctggaaacaggtattggttacggtaccgacactggcgcccgtttacgtagtcaatatagacgttcgattgtaaataaatacggtcattcatttgatgcaaacttggagctttcccaaattcgtcaatctatagatgggcgctatagtattccttataaacatcctttaaatgattactttaatattgtgggtggttacgaacgtgagacgagagatgatattggtccggatgtaagcttacttacagaatcggcagttttagggggtgagcgagttattaaaaaaccactcggaaactggcaacatactattggggtacgttatcgtctcgaccgcctaactcaaaaggggaatgtagatatctctgagctaccagatgcatttaaaactgctgcatcagagcaagaagcattattatttagttatgagacctctaaaacctcaagtaatacacgcttaaacccaaccaaagcttttaagcaaacttataaattagaattaggtagcgaaagtttactttcagatgccaatatggcgattgcaacagccggttggagatttatttattctttaggtgaaaatgatgaccatcagtttgttgggcggtccgattttagttatatttttaccgatgagtttgataaagttccatacaatttaagattctttactggtggtgaccagacaattcgtggttttgattataaaagtctttcaccagaagataatggatataagattggtggacaggctctagcagtaggctctttagaatataactatcaattcaaagagggttggcgagcagctgttttttctgattttggtaatgcttacgataagagttttagtaatccgacggcctatagtgtgggtgttggtattcgttggaagtccccaattggaccaattcgtttagacgtggcttctggtatttctgatgataaccatccgattcgtttgcatttctttattggtccacaactttaaaaataaaattttattaggtttattttatggcggaagtagaacagcagcccacttcggcacctagctctcctaagaagcgacgtattttgcgtagcttcttgctgacaatcttgatcatacttttattacttgttgcttccatcattattatgatgtcgactgaccgtggaagtcgttttttattagatcgtgttttacaagctcagcaagtcattaaatacgagtatgaggggggtaatttactcaggggaattattcttaaaaatattattgttcagttaaaagaagttgacgttactttagatagagctgatgtccgtttagggtggcgttctttaatattagaaaaagaagtgcatttgagcaatgcagatgtccgtaacttagttattattaacaaagctccgccatcggataagccatttgagtttaaacccattaaattaccatttgtgcttcgtgtagatgttggagatgttgatcatttagaaattaaaaattcaggttctgtcgtaaatttccatgatgttcatttaaatgatgctttgtggtcagagacaaaactgaaatttgaaaattcaagtatggatatggggtatctttctgttcataacgcaacaggaaatatggactttagcggcaaatacccactgaatgcgactgcagatttaagaattccttctttaaaaagtttaaacatccaaaatattaaggtggcagcgcggggtagtttagataccttgcaagccggtgtagcaacgacaacaccagatttattaacaggttgggttgttttacatcctgttcgtcatgaagtgcctatgcaaggtgcattgttactcaaaaattatcacttgcctttactggttgagcaaaaattatttgctaaaaacggtgtaattaaatttcagggtgatattaagcaactcaacttagcacttgagacagatttaaaaggggagaatttacctgaaggccagtacaacgccttaatgaatactgatctggttcatcagttgaatattactgattttaacgggcaggtcatgaagggtgcagttaatcttaaaggattagtgaactggaaagatcatgtcacttgggacatcaaaggtcgcctagatcatgttaatcctaaagacaaagctattccacaggtcgttcaggatttcttgccgccaagtctagatgcagccgtttcttcaactggttctttggaaaaaggtacggaagtatttgccaatgtagactttgaccgctatgaatcttggaaacttaaactaaaccaagcacctgaaaagaataagaagccacaacctatgtttatgaatgtggcttgggcaaatatagatcgtgctatgccatatataggttggttaagtagtgatagtggtcaagttgatttgactttgcgagatggtcagcaagatattaaagtttcgacaaaagtatatcagcatgaacagaccttattaccggctggacaatatttagcaactttgaatgttaaagataatattcttaatgttcctagttttagttttgcggctcaaaagggtagcctcacaggtcaggccaaagtcttattaccaagtgaaaaacgtcagctggcatggaatgcattattaaatgcaaaagactttaatccacaaagtatacatacagcggcgccagttaacttgctcaacggatcaattaaagccagcggttttgcaaagccaaatcaacaaattattcagcttgaaaaaattgatttaaaaggtcgcttggctcaagcaggtcaagaaatggttgcgctagctggaaaaagtacagcagctttattatttaatgatgttaaagctggtggcggttttaaaggctttgcggtcaattatgacggatctttaaaagcgcttaatcaagctaatggactattaaagttttctattgcaggtaccccagaatttatccgaattagtcagttacaacatgatggtgttgctgggaaaatctatgcgactggggcattaaatttaaaagaccgtattgcttgggatattaatagctcgttagtacgctttaaacctcaatattttgcctctagtgtaaaaggcgaaatttcaggaaatgtaaaaacacaaggcatctggtctgacaagttaaagcgtattgatattcaacaattgaaccttgcgggttatttgaataataagccagtcagaggtaaaggtaacttatccatacttatggattcgaaccaaaaaggttttttacctcagcaatttgaggcaaataatctatttttagtttatgcacaaaaccagttgcaggcgactggtaatgcacagaatttaaaaattaagctgaatgcacctgcgctttatgagttgtatccgggtttaagtggacgtgcatatggagacttgagtgtccaatctcaaccgcgtttgaaagctacggctaatattgcggttgataattttgcatttaatacattagtcagtattaaaaaacttcgtatccagggtgaattgcctacttccgaaacaacaccaactcagttaacagcaaaattagacaatttacgtagtggtagccgtcaaattcagtctgctgaggtgaatttaacaggaacaagaaaagcacatttattaaaagtgcaaggaaataataatgtttctaaattctatgttcagttagcaggtggatttaatgcgaagaatgattggttagggcaaattcaaaaaggaagttttgattcacgccgaattcgtctagcacaaaatcaaaatgcaccagttgttttctcatcggcacgttctgaattatatgttggacaacattgctggcaaagtacaaatagccagttgtgtcttgaccagcctgtgcgtgtgagtaaagcgcaaggcaatatttcatttgttactcagaatctagatttaggcgattttgctgcgttcatgccggaaggtttggctatgactggtcaacttaatggttatgctaaagcttcttgggtaaatggtgggcatcctaagcttgatgcacgcttagtgacaagaaaaggtgaactgggcttagcagcggaagacccgcaagatccaccgactactttggcttatgatgaactgagtgtaattgcgaaaagtatttcagaaggcttattgttccgtgtcgatgtaaaaacacctgatattggtacaggatatgcgaatgttattattaatccttaccaatcatctatgccgatgcatggagaggtagcttttaacgatgtacagttaaaagtgttaaaaccattcattcaagatgtacgttcaatgagtggtaccttagccttagctggcaaagtgaatggtactttgacccagccacagtttacgggcgaaatgcgtttgaaaaacggggcaatcagtatgatttccctgccggttaatttaaccaatgtacaggtgtattcatctattcatcaggacatggcaacaattgatggtgcattcaatagtggacaaggtgtagggttacttaaaggtagttttgactggaaaaatgcaccgcgtctacagttaaacttaaaaggtgataacttacttgtacgtcaagctccattaattacggccattgcaaatccgaatttgacacttgatatgtatccttttgataagcgtttaagcttgaaaggatcagtagatgttcctcgtgcacgtatttcaatgcctgaaacaactgcaccagtggttaacacatcttcagatgttcgtattgttcgccaaggtcaggacccacttgcaattttacgtgcggcaaaaccgtgggatatccgtgcagatatttcggtaaatattggcaatcaagtcatcttccaaggctttaacagtaatattcctttagtggggcgtttgaatttaacccaacgcggttatgaaacagcaatgcgagcaatgggtgctattggtgtaagtcaaaaagtgaaaattgaggcctatggtcaaagcctagatttaaaccgtgcaattgcccgttttaatggcccattggcagacccgacgttagatattgatgcgaataaaaatgttcagggtagtatggttggggttcgtgtcactggtactgcttcatcaccaaacattcaagtttataatgatgcaggcctttctgaacaagaggcattaaatgcactcgtgacagggcgtattaatgaaggtgccagtggtttaagtaatgcagaaggctttaaatctgatgtgaacaatacaattgctgctgccggtattagtatgggcttgggtggtactcgtgctttaacgaatcaaattggtcgtacttttggtttgagtggtcttgcattagatgctcaaggtacaggagatgatactcaagtaagtttaactggttacattacacctgatttatttattcgttatggtgtgggtgtgtttactccagtcaataaactgacgttgcgttatcaaatgaaccgccgtttgtatttggaagcaagtcaatctttagaacgagcaatagatttattctataactggcgattctaaacgctttaagaacactaaaaaccgagatgaaaacatctcggttttttattgaagttgggcaaaaataaagacatataagtagaatttttgcaaagtctgccagattcagtatgatgtgggcagcatagtctgtgtagagtaatgatgaaaaaagttttatttgttttaatgggcatgttaatagtcggctgtacagaaaaaaagcctttaacacctgaagagcaatggcatggctattgtacaagtgtggggaatgcagcaagaagtattctgtttgatcgtcagcaagcaattgaaaagtctcaagccattgagcatgctaataaaattgaagacgaaattacgaaaaaattcatctttaatattattgaaaaagtttacgccattccacaagacgaattaaaaacgaatccagaagccttgcaagaaaagattagaaaacaaatgacagatgagtgtttggttaccccacatgacaaaatgccaaactacaaaaaattctaagtgtataagacatcgtcaaacactccactaaggtggagtgttcttttaacttaaaataccgcatgataaatccatcattaagatcattatttatacacgggtatttagttacaaaataatgggcatcacggagaaacaccccgcgctcattaacttttggcttgaactctagtaaaattttgtagtccatattacttgtgaagctttgtgaaagctggaatttacaagtaattttttaaaaaaagaggaatgaacaccgtgctagaagcttaccgccaacacgttgctgaacgtgccgcactcggagtcccaccgaagccacttgatgatgctcaaactgctcaacttgttgagttattaaaaaacccaccggcaggtgaagaagcattcttggttgatttgcttgaaaaccgtgttcctgcaggtgttgaccaagcagcttacgtaaaagcagctttcttggcagcgattgcaaaaggcgaagcgacatctccgctagtttctaaagaacgtgcagtttatttactaggtacgatgcttggtggctataacgtagcgcctttagttgagcttctggatgatgctgaattaggtagcttagctgctgaagctttgaaaaaaacattacttgtatttgatgcgttccatgacgtagctgataaagctaaagctggcaatgcaaatgcaaaagctgttttacaatcttgggctgatgctgaatggttcactagtcgtaaagatgtaccagaagaaatcaaaatcactgtgttcaaagtaacaggtgaaacaaacactgatgacttgtctccagctcaagacgcatggagccgtccagacatcccattgcatgcaaatgcaatgttgaaaaatgagcgtgatggtatcaaccctgaaaaaccaggtgaagttggtccattaagccaaattaaagaactcattgctaaaggcaaccaagttgcttatgttggtgacgttgttggtacaggttcatctcgtaaatctgcaacaaactctgttctttggttctttggtgatgaaatcgctcacattccaaacaaaaaagacggtggtgtgtgcttaggcggtaaaattgctccgatcttctttaacacaatggaagatgctggtgcattaccagtagagatcgatgtttctaacatgaacatgggtgacgaagttactcttaaaatcgatcatgctgctgcaaaagtaactgcgttcaaaaatggcgaacaaatcgctgagtctgaacttaaaactccagtacttttagatgaagtacgtgctggtggtcgtattaacttgatcattggtcgtggcttaactgctaaagcgcgtgaagctttaggtttagctccatctacattattccgtactccagtacaaccagctgacactggcaaaggtttcactttagctcagaagatggttggtcgcgcatgtggtctcccagaaggtcaaggtatccgtccaggtacttactgtgaacctaaaatgactacagtgggttctcaagatacaactggtcctatgactcgtgatgagttaaaagacctagcttgcttgggcttctctgctgacttagtaatgcagtctttctgtcacactgctgcttatccaaagccagttgacgtacaaatgcaacatacacttccagacttcatcatgaaccgtggtggtgtatctttacgtccaggtgacggtattatccactcttggttaaaccgtatgcttcttccagatacagtaggtactggtggtgactcgcatactcgtttcccaattggtatttcattcccagcaggttctggtcttgtagctttcgctgctgcaactggtgtaatgccacttgatatgcctgaatcagttcttgttaagtttaaaggtaaaatgcagcctggtatcactttacgtgaccttgtacatgcgattccttactatgcaatcaaagaaggcgatcttactgttgagaaaaaaggtaagaaaaacatcttctctggtcgtatcttagaaatcgacttaacagaaatggaaactgacttaacagttgagcaagcattcgaactttctgatgcttctgctgaacgttcagctgctggttgtgcaatcacactttcagaagagaaagttgctgagtacttacgttctaacatcacaatgcttaagtggatgatttcacaaggctatggtgatgcacgtacgatggctcgccgtgttgaaaacatggaaaaatggttagcaaacccaagcttacttaaagctgatgctgatgctgaatacactaaagtgtatgaaattgacttgtcagaaatcaaagaacctatcctttgctgcccgaacgatccagatgatgcgaaacttctttctgacgttcaaggcgacaaaattgatgaagtattcatcggttcttgtatgactaacattggtcacttccgtgctgctggtcagttacttgagaaagtaccaagcggttcattaacaactcgtttatggttggctccaccaacacgtatggacgaacatcagttaatggaagaaggcttctataacacttatggccgtgctggtgcgcgtacagaaatgcctggttgttcattatgtatgggtaaccaagcacgtgttgcgccgaacacaactgttgtttcgacttctacacgtaacttccctaaccgtttaggccaaggttctaacgtttacttagcatctgctgagcttgcatctgttgctgctgtacttggtaaattaccaactccagaagaataccaacaatatgcagctcaaattgacagtatgtctgctgacatctacaaatatttgaatttcgaccaaatgggcgaatatacaaatgctgctgataaagtagatactaagaaaattgctgctgctcagttgacttaataggtcgatttagtacaaaaaaggagctgattattcagctcctttttattttaatgagaattggtacatattttaattattaaaataataaattaatcatgttttattctaataaaatgtaaaaataaatataacgctagatattaaagaagattttgttttaaaatatttgtatgaacttaaaaataattaaaaagaacatgggtattttatatatggaatttaaaaatgctaaagacaattgttgaatttaaatttgatgattatcagctatatgatcaaaatttatcagcagaagacgggaatactttagtacagaaaactgaagatattgcacaatatatttatagtatattaaaaaatagatatcacttaaatattgagttaaatgctgagcgttggggctgggaaatagaagtgccattacctgagattacgatgtatatcggtattagcgtttatgaagaatacagtaatggttttgcaatattcatttcaccaaatacaccaattttaagaagatttctttttagaaagttagatattactcaccatattatgttgctacaaaattatattaatgtcattttgaagtcccatgccggtatatatgatgtgcaatggtgggaggaaaatgagtttagatatgttgcagcgcattaaaatataattagtaaatatgaaatattatttatgattgtttagctaatacaattaataaaatattttattggctgctatagtggtgaatttacgtatgtgagcttaatatatgttcaatataacgtggttcagatccgtatgcgaattttagcatggaagacagtacgtcggttcttctataacaaccttcataatcatgattacgaaacgacagtaagtagatgtattaactactttttagttttcttaattattgggaatgtagttgctgtattactagaaacagtaaatgatctgtattacagctaccgtatatggtttgactactttgaaaatgtttcaattgcaattttcagtgttgaatatctcttacggctctggagtatagtcgagcgtgattcgacacaagctgcatggaagcaacgtttcgcatggatgaaaagtggtgaagcactgattgacctcatggcaattttgcctgcgtatctaaatttctttgtacgaatagatcttcgtatgttaagaattttacgattacttcgactattaaaattaactcgttatttcatctcattgcaaatattgttatgtgtgattaagcgagaaaagggttcttttcaggcagtgatttttattttaatcattatgattattatgactgcctctggtatttatgtcgttgagaataaagcgcaaccggaagcttttagctctattcctaaagcaatgtggtgggcggttgtgactttaactacagtcggatatggcgatgtcacaccagtaactagtttaggaaagctattgggagccttaattacaattctaggggtagggattgctgctttaccggctggtattttagcttctggtttggccaatgaacttaaccagcgtaatcagcgccttgaacaagagttccgtgagttacttcaagtgcgtggtattgatatcatgcatgatgaagttgaaatagaacgtattcgacaaaaagtagggctaccaaaagaacaagcgcataatctgattattcaaattatgcgcgaaaaagtattagaagagaaagaagctgttagagagaagaaatgttattgcccgcactgtggtgaaaagttaacagattagagattcaacgaaagcctgatcatactcaggctttttgagttgctttttctacagcaaatgcaataagtaagataataaggccaccaaggctcagtacaaaacctacccagattggtgcaatccaacccatctgatggctcagtacccaaccacctaaaaaagcgcctaatgcattagcaagattaaaggcggagtggttaagtgaagctgctagcgtttgtgcatcacctgcaacatccatgaggcgtgtctgtaaagccccacctaaacccataacggttaggccaattaagaataaagagccaattgcgctatagatattactcattagaaagcttgcgactacaaatgcgatcgctgagctgatgagtacgcctacaatagttttattgaggtttttatctgcaagccaacccgcagctaaaccaccaatcaccatcccgatgccccacagcgctaatgcaataggaacaatctggatattaactttggtgtattcagtgagaattggtgagacatagctatataccgagaacatgcccccaaaaccaattgcgccgactgcaagggttaaccacatatttatatttttaagccccgctaattctgtttttatgctggcagtagcttgaactggaatattcggtacaaagcaagctacagcaattaaagtaaagaatgcgatcgttgctgaaaattcaaaacctgctctccagccaaaatgttgacctaaccatgttgctaagggtacgccaataacggtagcaacggttagtcccatcatcatttgcgcaactgctgaagctcttcgtgaagggcctgctagttcagccgctactaaagcgccgacaccaaaatatgcgccatgaggtaaacctgcaataaaacgagagactaaaacggtttctggggtatgtgctaaagctgtacatgcattggcaataccataaaacagcatgaggcaaagcaatagggtctttctaggcactttggcacccaaaatggcaataataggggcaccaataacaacacctaatgcataagcactaataaaatgcccagcttcaggtactgtaatctttaaattgtgtgcaatttcctgaataagacccattgcgacaaattctgtagtgccaatacagaaaccgcctactgcgagagaaaaaattgccaagaagagtgagtaatgtcgaggggaagatgaaggggattggggtgacgccataataaattaataaaaggaaactcaaaaaagaaagtataagggaaaagagaccaaaataataaaaaactagaatctcgagaggaagtttgcatatttaaaaccggaatattttatctttatattgaataatttatcgaattcttttatcaaattggatatgatgagcgcgtaatactttaagcattacaataagttgtataaatacttaagaaatagagaagttaaatcgtgagaaaattatgtattgcctgccttattggtatggctatgttatctatgtctggttgtgccgtatttatggctggtaatcaaccaagtaaaaaaatttaaatgttttaaatccgggtagctctcgtaattatgttattgcagagtttggggcacctgtcttgtctgagtaccgtgatgggacaagagttgaaatctatacattccagcaaggttattcaaagtgggtaaaagtaggtcgtgcatttgggcatggggttgcagacgttgcctcaataggtttatgggaagtatttggaactccagctgaagcatactttaatggtaaagaaacaacttatgaagtgacttatggtgaagatgatttagtaaaaagttataagctcattgactttaatcaagcttttccaaaagtaaaagaacaatgaggtaatgaaagaggccacttggcctttttctttttatataaaaatctttaacttaaatttattaatgataataagaattatttttatttgtgtataatacatttgcttatgatttgtctgtaaaaatttaaattttcctaataaggatccagaaataatgaatagattattagtaacatcacttatttttgtatgtagttacagccttgctcatgaaccttatgttgcgccattagcgtataaaactgagcagacgcaagtaccggtcgttgctggttatgctgaagaagcactaaatagtgaatacgctttaaaagatgccaagcttaccgtcattacccctaaacaagatcctaaagttattaatgctgaaactctacataaatctgtaactgttttcgatgttcctttaccggaagacggtacatatattctgcaaactcaggcaagttaccctttaaaatatgtatatgatcaaaaggagtggcatttattttttgatttaccagctgataaagctccgccaaaaaaagagcgtgactatctaattcctgctgatcttaaaactaaaaaaattaaaacagaggaagtaacaagagaatgggtgttacaaagttatctttcaaaaggtaaagtttcagatattcaacttccaaatacaccagttaaagttaatttttctgttcatcctaaccagcttaaagttactcaagcagttcagctaaccataagtgaaaaaggcaagaacctaccttatgctgaaattaatttaagagagaaaggtgcaactgataaacaagtactacattttaaagctgatgataaaggacaagttgaacttaaatttccaaaagctggagaatatttaatggaagtcacagctccagtggatttaaagttaaagcctaaaaatcaaaattatatgattgttagcttacaagtgaccgagtaagaatatttcattttataaaaaatagatctgaatgggtctattttttatttgttagtaaagtccatatctaataaacaaaaacttatgttgagacaaattaattaattttgtgataagatgaatagtattcattggtgatgatttatctccgtaactctgtttagtaataaacaagagataacttaaaaatttatagataaatttatgtattcaggcttgtgcccatgttagaaattcgacaccttaaaactttagttgctttacgtgaacatggttcactggtcgctgcagctaatgacctatgcttaacgccctcggctatttctcaccaattaaaagaattagatcattggtatggggtagaggtggttaatcgccgcagtcgacctgttagtttttctaatgtaggacagcgcctacttaagttagctgatgatgtattgccgcaaattcagattactcagagtgatattacacgtattgtgcacggacaaacgggcagaattattttttcatctgaatgtcatagctgttttgactggctaatgcctttactcaatcagtaccgtcagcaatatccagatgtcgatttagactttgcttcggggtttgaagcgaacccacatgaacttttacaaaatgctgagtttgatttacttattacagccgatccgatcgcgctaaaaggaatcgaatacttcccgatttttgaatatgaatcgcgtttggttttatcaaatactcatcgattggttcgtgctgaaaatattactgttcaggatctcgcagaagaggttcttattacttacccggttgataagcaccgtttagatatcatgtcgaaactgtttatacctgcaaatattcaaccaaaacaaatccgaacaacagacttaacgcaaatgcttattcaacttgttgcgagtggccgaggtattgctgctttgccagattgggtagtcaatgaatacgaacaaaagggatgggtgactagccgccgtctagattgtgtttctccaacaggtttaagacgtacattgtatgcaggttatcgaactgaagaaaaagagaagagctactttgaaggtttcttaaagcagctagaaaagttttctttaaaacgcacttcttactattcaggctaaaagtacttatttagcctaagcatttattaaaaggtaccttcgggtgccttttatttacctataaataaagataatagacctgctgcaatcagcgggccaacaggtacaccacggagtaacgctacacctgcaaccgtaccaataagtaagcctgccacaacatcaggttggctcgacataagttttacaccacgaccacctagccacgcgacgagcagaccaattgcaatagcgactaaagatttaaaactaataaaggattttaaaatactctctccactaagcttgccacttgcaataggggtgagtacgccaattgttagaataagtatgcctaagtttagtccatgtgcctgaatataaggaaaaaattgatttaatggcgtaatttttatgacgattaaaacgcctgctgcgatagttacagctgcattttgacttagtaaaccgcagataagtaaaactaataaaacaactaaattaacatcaaattgggcaagcatgagaagcggcaagaaaagcaaataatttgaattgtataataattgagagccaaaatgtcagagcttttaaggttaaaaaagatcaaacaaaggctttttagtggaaattttcttgtatatgactcaatgataaagagttttatctgtggttacgcttggaaacaatgttatataaattaacaacttaaaaagtattcttttgagagagtgtgatataaaaataatcactactcatgagtacaggattaatcttatggatattatagatatcaagatcaaagaccaatttgatcaaattcatgatgcgaaagctcaattaaagaagaatttagttgaacatgaaaatgagcctttaaagctaagtcagcgtatcgaacatattattgtagataatgaggtgatcttacccactacagaattgctatttgaaagtgaacaaaacgaaaaaatttatcgtgttattgaagaataattcaaagttaatgaagttaaatgcgaagatgataaagcagaaggtaataaaacactaaaattacgttaaaataatggtttcgttttaaagagaaagctttatgctgctggaaaaaattttacaatcacaagggtttggttcacgtaaatattgtcagcagttaataaaaaatggttcagtaagtattgatggggaggttgtgagtgatctcaaaaagcagttcgccccagaaaattttgagttttccgtttttggtcaaaattatcaatatagagaaaaaatttatattgctctaagaaaacctcagggtttcgagtgttctcatcatcctcagcatcatcaaagtgtttttagcctactgcctgagaccatgattcatcgtggtgtgcaggcggttggacgcttggatcaagacacaacggggctgcttttacttactgatgatggtaaatatctacaagctttaactcatcctcgtaaacatgtaccaaaggtttatcacgttacaacttacgaccccgtaacccctgagcaaattgaaatgcttattcagggagttaatttacaccaagaaaaaggggtatttgctgccacagatgtagcactactagaaactcatcaattaacgatgactattcatcaaggtgtttatcatcaagtcaaaagaatgattgcagccgtaggcaataaagtcgagaaattacatcgacatcaaattggtcaattggttctacctgaaattgaggacggggattgggtatatttgtcggagcaggaaaaacaactcgctcaaaatattatttaagaaaacaatgaaatgtctggaactcactgtctctaataaaccccattttttcatagaggcggtgagattcatgattattcgattgggtttctaggctaatacgtaaagcattttcttgttttgcaaataaaatcgctgtatcaatgagctgttttgctgagccttgacgacggaataggggagtaacatatacatcatctaagatgtagtaagttgaacaagcaactgaagaaaaacctaaataaagcaatacgaacccagtaattttttcgtccttaatatggatgaaaaatacgctctctttattctcaaaacgttgttttaagaaatgatgggattcttcgagattagaagatgcaccataaaattgacggtattcatcaaataggacagcgagttggcttagatcttcataggtcgctcgtcttacaatcattaggcgctccttgtatttatgtttatatttttacaaagagagcataactaaaaaagaagcgaattgacgttaaaagttgtttaaaaatgcaacaccgttaagttttgtcactttcacctaatagtgcatttaactcttcaaataaatcttcatggtcatcatcttcatttaaagttgaagcgttctgatttaatgaagatgcttttgcttttctcagttttaataattgttccatattaatattctggttttcgatcgcaaaaggaatagatttggttaagacgacttgtttaaagaacagtcgtactgcttgggcaggggtaatccccaattgtttaaaaacagcaaaagcctgttttttctcttgggagtcaagtcgaacctgataaacttctgtttttcgcatgaataacaaaaccaaatgatttttaatttttagggatttattttaaaccatcggaatgtaatttcaatgtctttcagcataaaaaataatctttttgtcattacgatgcgattacagtgtcaattcaagctgtgaattgaaaaccatttcctgttttgttagcgggtctataaaagaaatttgcttagctagaagctgtaagggctgagaaaaatcatcatcggctttatgttgaactattggataaaacggatcatttttaatcggaattcccaaatgatttaaatggacgcggagttgatgctgttttccggtggttggcgttaaacaatatttagcccatgagtgattatgttcaatcagctcaattttagtttcggtattggtttttgtatgtgcaatcacctgcattgtataaaagggtgtacctttatctaaatacagttttaaattctgaggaaattttaattcagctttatatgcagcgattgcatggtaaatcttattgacttgacgatctgcaaataactgttggtaaattccacgtgactgtggtcgtttgcaaaataaaacgacaccggcagtttcacggtctaatcgatggatcggggttaaaaactcattgccagtttgcttttttaatcggactaataaagtttcttgtacatattgccctgttgggctaatcgttaaaaaatggggtttatctacaacaagcaagtcatcattttcaaataaaatctgatgctcaaagggaacatgtacttcgttagcaaggaatcggtaataaaaaatatgcgtgtttgctatataagggctgtttaatgttaatttttcgccatttgccgcgtaaataagcccatcttgaaaacgctgctgccactctgttgcttttatatgtggaaaattttcgcaaagaaattgatagatggtttgtgctgtcgtttgtggaggaagatagacttggcttgcgcttacgccatcaatcataggtgggaaaaattcaatcggactagacataaaagtgtgtcaatagttaataaatgtgatgtaaaaaaaagccaactttaagcacttaagtaggctttaaagcagggcaatggtatcatatcgattattttgaatcatgttatgtgtgttatgtcgtattcattgaaaatggtcttaaatcatgaagaagatacccagcgtttagctcaggcattggcgcagcatgttcaagctggcgtgatttatctgattggagatttgggcgccggtaaaacgacattgacccgttattttttgcaagctctagggcataaaggctcggttaaaagtccgacgtatacgttggttgaaccatataaaatcaataataaagaaatttttcattttgacttatatcgtctcaatgatccgtacgaacttgaattaatgggaatccgtgattatctagatattcaggatgcactatttttatttgagtggccatcgaaaggtggagacgaaatccctgaagcagatatcgtcattgatattcaaaaatcagatgatgaactcaatcgtttcgtcaccttaactttaccaacagagcatttataccagactttgcaggaacagcttcatgactgatgaaaagctaacacaacgtcgtattcatacattagacgccgcgttagcgaaccagattgctgccggtgaggtgattgaacgtccttcatcggtcgtaaaagaattattagaaaactcaattgatgcaggtgcaaccgaattaattgtgcggattgcacaaggcggctcaacattaatcgagattattgacaatggacatgggattcatcctgatgatttaccattggcagtgatgcgccatgcaaccagtaaaattaaaacagcagaagatttacatgccattgttagcttaggtttccgtggtgaagcacttgcttctattgcagcagtttcacgattgactttaaccagtagccaagatgaaagcggaattggtcatcaggttgaggtgaatggtaccgcctttgatcatcaacaagtccaagctgttgctgcacaaaagggcacccatattcgagttcaggacttgttttttaatgtgcccgctcgccgtaaatttttaaaaaaaccaaccactgaatttgggcatattgaagaaattgtacgccgtttagctttaacgcattttgatatacgttttgtacttgagcataacgataatattcgaattaatttaccaatagcagatagcggtgaattaagatttcagcgtgtacagcaattattgggtcaacagtttgttcaaaatgcttactggatcgatgccgaaagtattaacatgcgtttgtcaggttggctagggcatccttcagatgcacgtgcccaagcagacttacaatatgtgtatgtaaatggccgaattgtgaaagataaaaccatttcacatgctttaagaatggcatatgacggtattttacatggccatcagcattcatcttatttacttttcttagaagttgatcctgaaaatattgatgttaacgttcacccgacgaaacatgagattcgttttctaaatcaacgtgaagtacatgagtttgtaagacattatgctaaagaaacgttagcacaatttcagacagctagtgctgatttagcacaagccatgaaagtggatgatactcaaaatctttcggtacaacctcagcctaaataccaagaacaatttacattgcaccgtacagcgcaagccgctgatacagcagtagacaagccaaatggttatcagccttctactgagcttttaactgattttaataatagtcgtccccaatctgttcattatgcggaacaaactccaaaatataatggttctgcgcagttaaataatgcattaaagacttacttggcaccattacgtgatcaacctgctaatttttcagttgatgaaagtattgagcctgtcgctaaggtagatgaatttccactaggtatcgcaattgcccagcttcatggaatttatattttggcgcaaaatactgaaggcttgattattgttgatatgcatgcagcacatgagcgtattttgctgcaacaaatgaaaaatgcttgggataaacctgagttttggacatctcaacagttgcttatccctaaagtgatctcaattagtcgtatgcaagctgttcgtgttgaggatttaaaacctcagcttgaacgcttagggttagagattgatttatatggcgatgagcaagtcattgtgcgtggtgtgccggctattttgcaaaaagcggattttgaaaatcttattcccgaacttctcaatgacttagatccaaatgatgaagcacaaggtttattgcaaaagcgtgatgaactgttagctggtatggcgtgtcatggtgcagtacgtgctcatcgacaacttagtctctcagaaatgaatgctttacttcgccaaatggaacaaaccgaatttgcgagccaatgtaaccatggtcgcccaacttggcgtgcatttccattatctcaactagataaattatttgctcgaggagagtagttttacatgtcaaaccaattgcccgtcatcaatttaatgggaccgactgcaagcggaaaaaccgctttggcatgtgaactctatgaacgtggaaattttgaattaatttcagttgattctgcacttgtatataaagatatggatattggtacggctaagccaacgcgtgaagagcaggagctatatccgcatcatttaattgatattattactccacttgaggtctattcggctgctcagtttgttgaagacgcttgtgctttaattgatgagatgcattcacgtggtaaaactcctattttggtaggaggaaccatgctgtatttcaaagctcttttagaaggattatcaagtaacttgccaagtgcagatgcaaatgttcgcgcagcaattgaagaaaaagcagcaaatgaagggtggcaagctgtttatgatgagctggtagcagtagatccggcggctggagtgaagtttaaggtttctgataaacaaagaattattcgggcgttggaagtttaccgtattacaggtcaaccaattaccaaattgcaggcagaacaaccaaaaaatgtaccatatcgatacacatttcataactacgctttacttccagatcggttagaattacatcaacgcattgagcaaagattaagcaaaatgtgggatatcggttttttgagtgaagtcgagtctctaattgaaaaatacgatttagatgaaaatttaccctctatgcgttctgttggttatcgacaagctctagaatttctattaaaaagtgatatgagtctcaaaaaaaagcaggaaatggaggataaagccttatttgcaacacgacaacttgccaaacgtcaatatacgtggttacgttctttgcaagaaatacacgattttaaaacttacttgacgataaagcaggcgaaagaagacttgcgaaactcttatggataaagcaaaatttgcacactgtctttttataatttttagttgaaaaataaagatagtttttttgcgctgatttaaaaattttttttggagttaaaaatgtctaaaggtcaaactttacaagatccgttcttaaattctctccgtaaagaacgcatcccagtttctattttccttgttaacggtattaaattacaaggtcatattgaatcttttgaccaatatgttgttttattaaaaaatactgtaagtcaaatggtttacaaacacgcaatttctacagttgttccagctcgcaacccacgtccagcaggtgcacaaggtgcaggtttcccagctcagggtggtagtcaaggtggcttcggtggtcaaggcgctggctttggtggtgctcaaggtgctggcttcggtggtcaaggtggctttggtggtcaaggcggcttcggtggtcaaggtggcttcggtggtcaaggtggcttcggtggtcaaggtggcttcggtggtcaaggcggctttggtggtcaaggcggcttcggcggacatcaaggcggttttgataacgattctaaatttgaagatggtcaagacgacgaaaacaatcgttaattgattagcttgaaaaaaaccagtcagtgatgactggtttttttatggctttaaaaatataaaaaagcatattaaagctacctgcggtccatctctgtttcataaaatttagattaataggttctttgcaaatggtattaatatttgctgcagcattgtgcagtgttctggtttctgtactacttaaaaatttaaagaaaaagggatatcaacccatgcaaatgattgcatggaattacgcaagtgccagcttgctatgttatctgtggtttaagccagatattcagcatatttctatacaacatacaccttggtggctaatagcggctttaggcgtcattctaccgagtatctttttatgccttgctaaatctttagagtacgcaggtattgtcaaaaccgaaattgctcagcggttgtccgtggtactttctttattggcagcttatttctttttccaagagcagtttaattcacttaaattattagggataggtttgggaatttttgctgttctcttaattttattaggtcatttcaacgagtcttccggatctcaatcaaaaaaagcaatttttgctttgatgagtgtctggtttggatatgccgctgtagatatcttgttaaaatatacgagtagcttaggcctacagtttactttgactttaaatctaatttttataacggcctttgttttatcgattatttatttaatatttcaaaaaaattcagcatggcattttaaaaatacttttgctgggttaatgctaggtgtactaaatttttcaaacattgccctatacgttaaagcgcatattttactcaaagattctccggccattgtctttgcgagtatgaatattttggttgtgttacttggaatagtttgtggcgtagttttatataaagaaaaattaaaactcccaacgattttaggaacgattttgggaataagtggattggtttgtttagccttagctatgaaataggagttcaaaagactgttcttttgaactccactaaattcttataaatgtgtaaaaatcacttcatccggcagacgagattttggcaatttcgcattgaagtcattttcgcttctataacccagtgaaacaattacagagctacgcaaacctttttcttttaagccaaattcttcatttaaaacatcttcgtcaaagccacccattggagttgcatctatgccttcaagaccagctgcaaacagtagttgtcctaaagcgataaaagtttgattttccatccagccgaataagttcttttgctcattacggtaaaactcaacatagccatgacgagtatccttttgaccgagtttggctttctcatctttaaaacgaccacttaaatcatcttgttcaagtaactggtttaaatattcgggtgaaatatctgttcttgtacaaaatacaagggtgtgtgatgactcaagaaccttgggtgcattgtaggcatatcgtcctgttaaggctttggcaatgcgttctttagcagtaggattgtctgcaaccaagaaatgccaaggttgaatattcactgaagaaggggtaaagcgtaaaatttctaataacttattgaatttttcttgaggaatttttttctcgggatcgtacgctttggtagtgtagcgacttttaaccgtatttaataaatccatactttactccatatcaatcttattacaatggaagggttctaatctttggcatcatacgcgattttagagaaaaacatctgcattttaatgtgataaagaaatataatacttatataaattttttactaatttattgaaaatgtttgaattaataccaattaatcgaaaaagtaagctgcgagaaattagaattattaaagcctttctaatttctgcatttgtattgtgtcttttaattttatatatcgaatatcaaaagtatgcacatataaactggaaatttgtattcattagttgtctatgtatgatttgggattttgatttaaatagaaaaattaaagaattgaaagttcaaataaaaagtgattaatttctagctaataattccagacaatcaattcgagctgttgcgtatttgaagatggatcaatttccaaaatataagcctgatcttcacgccaatcgccaagaacaatccgctgtttatgttgtaattgatgaattgctggacggtgagtgtgtccatgaataagtatatctacatctgttagggcagagagaacagcttgttcatttacatccataatttcataacttttttgctgtttgtctgaatgacttcttttgcgaaaaccattgaccagttttgtacggaaactcaagggggtacggcgtaaaaaagcaactaggaaggggtttcggataattttttaaatttttgataggaaatatcatcagtacataacgcatcgccatgttccaaacggtattggtgacctgcaatgttgagataataaatatcaggaagtaatacaccattaaacttatctaggaaaacctgatttaaagcaaagtctcggttacccacttggaaataaacgcgattacctttttggttaaatacttttaaagcctcgacaatttcgtcgagccaaggcgctgaatagtcatcaccaatccaagcattaaaccaatcacctaaaatataaagctgtgtttgtttattttgataatgtaccaacaaatctaaaaaccctcgaacgagtcgagggtgttcaggtgacaagtgtaaatctgaaataaacagataagtcacagctttatcctaaaattattcagaaataattttagcagattcgataacaacgttttctaaaggaacgtcagcgtgataaccacggttacctgtacgtacgcctttgattgcttctacaacgtccataccttcaacaactttaccgaatacagcataaccccaaccttgtgcagtttttgaagtatggttcaggaaagagttgttttttacgttgatgaagaattgtgcagaagcagagtgtggagcttgagtacgtgccattgcaatggtacctacatcgttgcttaaaccattgtcagcttcattttcaatcgcatcacgagttgctttttctttgaagttttcgtcaaagccaccaccttggatcatgaaaccgtcaataacgcggtggaaaatcacgccatcatagaaaccgtcacgtacgtattctagaaaattagcagccgttttcggtgctttttcagtgttaagctcaagaacaatacgacctttgttggtgtttaattcgacttgaggaaaactcattacattaatctcctaaacatgggcaaattgaccatgggtttttggttgagagaagcataagcaaactgtaaactacaaggcaagtaaaaaacgttaaaatctttgtgaaaaatgaagatagcgtttattttttcgaaattttatctacaaagaagtgattgatacactatgaagcctaatgatgttgtctcgaacctgccaaacaacccgacaccgaatactcatgcctctgtcgattctgcgcagcaagaacaacaggctggattagattttgttcgccaagtcattaccgatgatttagctgccggacgtgccaaacaaatcgtaacgcgtttcccgccagaaccaaatggttatttacatattggtcacgtaaaagcaatttgcctcaactttggcgttgctgaagagtttaatggtctttgtaatttacgttttgacgatactaaccccgatgcggaagaacaagagtatgttgatgggatcgccaatgatgtgaaatggcttggatttagctggaatggcgaaccacgttatgcttccggttattttgatcagctttatgcttgggcaattcagttgattgaacaaggcgatgcatatgttgatttgcagtctccagaagaaatcaaattaaatcgtggtagctttgttgagccaggtaaaaattcgccatatcgtgatgcttctgttgaagaaaaccttgctcgttttgaaaaaatgcgcaatggtgaacttaaagagggtgaagctgttttacgcgccaaaattgatatggcaagcccgaatgtacatatgcgtgacccaattttgtatcgtgttttacattcagagcatcaccaaacaggcgataagtggaaaatctacccaatgtatgactatgctcatccattgtctgatgcaatcgaaggaatcacacattcactttgtacattagagttccaagaccaccgtccgttttatgactggattgttgaaaaagttaagtctaaagctgtgccgcaccagtatgaatcttctcgcttaaacgtagattacaccattacgtctaaacgtaaattacgtaaattggttgaaggcggttatgtgaatggatgggatgatcctcgtatgccaacggttgtgggtatgcgtcgccgtggtttcacaccagaaggcctacgtgatttctgtaaacgtgtaggtgtgtctaaaactgacggtattgtagatgtcgcaatgcttgagttctgtattcgtcaatctttagagaatacggcagcgcgcggtatggcagtgttaaatccattaaaagtaacacttacgaacttatcggaagatttagaccttacccatgctcgtcatcctaatgtcgatatgggtgagcgcgtgattccattaactaaagaaatctatattgaccgtaaagatttcgaagaagtaccgccaaaaggctttaaacgtttaattcctgatggtgaagttcgtttacgccatgcatatgtgattaagtgtgatgaagtcattaaagatgcaaacggtgaagtcgttgagctgaagtgttcgatcgatccggatactttaggtaaaaatcctgaaggccgcaaagtaaaaggcgtaattcactgggtatctgcaactaaaggtattcctgctgaagtacgtatttatgatcgattgtttacagaagctgaccctgaaactggtgatgatttcttagcaaacttaaatccagattccttgaaagtggttcaagctgtgatcgaacctgctttagctcaagcgaagccagaagatcgcttccagtttgaacgcgaaggttatttcgttgctgatcaatacgatcatactcctgagaagcctgtgtttaaccgtgttcttgacttaaaagatagcttcaagcctgagaaaaagtaagagattgattatctcttactttttctcaagacgaatatcatgtggtgagtaaacagaaaatataaaaagcccaactgtaaagttgggctttttattcaggtgtcttctcatattttctttttctttatgattaacgtccttggcaaagtagcttaggccgggttaatcacataaaaataaagaactaagatgatgaggagaacgcatgaaagcaataaataagtattgaccgtattaaagcttttaataaatttccagatatccatagtaattcagcgtatattttatgttacaaattaataatacactgaaaattttaagaaatgtttccaaagatagaatataaactttcctttgcttaaaaaataaacaattaataccaaatggtaaactctaacctttgtagatattagaaaatttctaatttaaccactatatccgattcgttttagaaacttttgaataacttcaaatgcagcatgttcaagtgcttgagcatattgtaagttttctactcgtagtttcggaattgaaattttggcattacgaagttcacatgtatggccaattaaccatttctcaaaattttcttctgttgtttcaatatgaaactgcaaggcaagaatattatttccaacttcaaatgcctgattagtataaatctctgaactagctaataacactgcgttttcaggcaagtcaaaagtgtcgccatgccagtgtaaaacatgcacattattaagcaaaggcgataatacctgattaggacgtaaacttaagcttaaggctccccagccaatttctttttgatggcctgcatatactttggcgccaagtgcatgcgcaataagctgtgcgcctaggcaaataccaagtgtaggtttatctgctgccaagcgttgtttaagtaaagcgatttcatcttttaaaaacggataatcttcggtttcataaactccgattgggccgcctaaaataatagttaaaccgtcatgtgtaaaagcaggggttaaatcatccacacctgcttcaaaatagcggacacgaaacccaagttgataaaaaacatcttctaatgaacctaggtcttcgaaagcaagatgctgaatggcataaatagttttagggaaggcgtttgttgtgttcatacaaatgatttagagaagatcaataggtggagtatagcgataaatataaagaagaaaatatccatacaaatcgtcaatacctgaaaattgctatttttcgttaagataatcttgttacgcataaatattttgtagggaagaaatatctacgcgtaactgctatttaaaataaaagctttgcgttttcattatggtcgatatttgaaagttgatgttcatcttttaaattcactcctgaaaagccaagctgtttcgattttctcattaatgccattaaacgttgtacagcaaccggaatacttaaacctgctgagcgaacatttgaaatacagttgcgtttggaatcgagacagcctgaatatgcattccatgtgtagtaaatccccatactgtcaggagagcttaaaccagggcgttctccaatcagcatgactaacatggatgctttaaaaatttctgcaacttcatcgcctaaagcaactctgcttcctgttgcaagtacaattggggcaaggctccaattttcttgctgaatatgttcacttagcgctgcaataaatgcgatagcatttgcttcaatcgctcttgcagagagaccgtcacctaccacaatacaaacatcatactgttgcgggttttctgcatacttcttaattaaggtatcttttgatggatttgaaagttggcgccccaaatctggacgtttaagataaatttctttattaggtgcattactttgtatatgaaaactttgcagctgctgctgtgctaattgctccgagaggtaggaaacatccatctcttgataaactgcatcttttgcttgcgcatgagacaactgaaactcaagtaaggcgcgtgttgggatactacaacctgcacgacccagagcaatacgggcatcggtaaactgtttgagcttttcccactgatcctgatgggtagaggatggatattgaatatcacgattaagtttcatagtgttctccctaattcatgagcagacgagagaattggtcaggcatatggtctgcccaacaaatttgagagttttgctgtttaaaaatcccttgttgttcaagccaagcggagaactcaggagcgggttttaaacctaagagttgtcttaaatagagagcatcatgaaaggaagtggtttgatagttgagcatgacatcgtctgaaccaggaatccccataataaagttaatgcctgcggcgccaaatagagtaagaagtacatccatatcattttggtcggcatcggcatggttggtataacaaatgtcgcagcccattggcacgccaagtaacttaccgcagaagtgatcttccagtcctgcacgtataatttgtttaccgttaaagagatattcggggccaataaaaccaacgactgtattcactaaaagcggattgtatttacgggccaccgcataggcacgagtttctaatgtttgttggtcaacgccgtgatgagcattgcttgatagggcactaccttgacccgtttcaaagtacatgacgttttgtccaatggttccgcgtttaagtgcgagggtggcttcatatccttcttgtagtaaatcaagtgaaattccaaaaccttcattagccagttgggtgccggcaattgattggaacattaaatcaatcggtacatttttttcagccagttgaatgcctgagctgatatgcgtaagtacacaagattgcgttggaatttgatattcctgaatgacatgatcaagcaatttcagtagctctgacaaattatgcaggttatccgtggcagggttaatgccaattacggcatcaccattgccatacatcaacccatctaaaatactggctgaaataccgagcacatcatcggtagggtggttcggttgtaaacgggtagaaagatgtccttttaaaccaattgtgttgcgaaattgggtgaccacttcacatttgctagcgacataaatcaaatcttgattgcgcataattttgctgacagcagccaccatttctggggttaaacccgatgctaatgcttttaagctttctggagtggcatcttctccaagtagccaatttctaaaatcgcctactgtaaagtgtgaaataggggcaaaggctgccagatcatgttcatcaataatcagtcgtgtaatttcatcagtatcgtaatcaaccacaacttcatttaaaaaggtttttaatggcacatcagccaaagtcatttgtgccgcaacatgttcggttgcatctctggcagctacaccggctaactcatcgcctgaacgtaacggtgtagctttggccattaacgtttttaggtcagcaaagtgatactgttgattggcgacaatattgcgataactcatagttacatccttttatttatagttcttgttctgcggctttaatatttgcaaactcttcttctggtgttcctttcactaaatgatagcggctgtagaacaaaaagtaagcaataaatacgacatagataccggcagcaataaaccacactttcggattaacaacaaaacctgcgaccacagcagcgactgctaaaactagtgcaatgcttgaagtgatgattcctcctggagttttataaggacgaggcatgtcgggtttagataagcgcagtttgatgtgggataaaagaatcagcacataagaaatagttgcaccaaaaaccgcgattaaaatgagtgaatcgccttcttttgtgagtgaaagtaagaacccgataatgcccggaataataattgcaagataaggagctttatttttattggttaaagagagtgacgtcggtaagtaaccagctcgtgacaatgcaaagatttgacgcgaataggcatagataattgagaagaaacttgcgattaaaccagctaaacccacaaagtttacgaatgtcgcaagccaagtgttggtgccataaactttaaccaaagcatctaccagaggggcgcctgagttttgtaaagtacttgcacctgctgcgcctgcacccaagaacaaaataagcatggcaaatgctgttaagatgagcattgcaccgattaaaccgcgtggcagagatttggctggatcttttgcttcttctgctgctaacggaacaccttctactgcaagaaaaaaccagatagcaaaaggaaccgcggcccagatgcccaagtagccatgaggtaaaaaaagacttgcgccaacacctgtactaactggaatatcaaataaattttgtgcattaaagtgtggaatcattgccccaataaacacgacaagggcaacagcggcgacaagtgtaatcgcaaacatgatttttaaagcttcgccagcacctttgagatgtatacccataaaaatggcgtaacaggcgaggtaaatcatccagccattaataccaaatagagattcgcaataaccaccaataaatacggcaatagcagcaggcgcaattgcgtattcaattaaaatcgctgtgcctgttaaataaccaccaaaaggcccaaaggcagcacgggcaaaactataaccgccacctgctgtcggcatcatggtggacatttctgacatagaaagacatagacataagtacataagcgcagcaagagcagtggcaataaacataccaccccaaccaccttgagcaataccaaagttccagccggcaaaatcacctgagatcacataagctacgcctaaaccaatcaggagtaaccaacccacggtaccttgtttaagttggcgctgagcaaaatattctgctgatgagacttctgcacttgaagaaataacggaagctgtttctggttgattcatacaatactcctgcgagttggtttgtatgaatgaatgcaaaagcaatgcctaaatgacgtgctttaaatattagatgacgcttttttattccggatagtaaaaatctgagagctgactgtactaaataaaaaagccagcaatttaaattaccggcttcttatataattaatgagcttgtttccttctagcgttgatagtttggtatcaacttggtgcgaaacttagaagaagcccattggtttggttgaataactcaccaacaagtttttggtttgttgatagtgatccagcatcatcttatggttttcacgaccaataccagacttcttgtaaccaccaaatgcagcatgagcagggtagatgttatagcagtttgtccagacacgacccgcctcaatagcacgaccagcacggtaagaaatatgtgctgaacgtgaccaaacacctgcacctaaaccatacatggtgtcgttggcaattttgattgcatcgtcaaagtctttaaatgttgtcacagccagtacaggtccaaaaatttcttcttggaaaacttgcatgctattgtggcctttaaaaatagtcggatcaacatagaaaccatcacctacttctttacggccactaccaccaagtaagagttctgcaccttcttctcggcccgtattaatacaacgtaagattttctcttgttgttgcaaagatgcttgagcaccaatcatggtttcagtatcgagaggatgaccagttttaatacgttttacacgttcgacggccaactctaagaattgatcagcaatactttcttgtactaaagcacgagaagggcaagtacatacttcaccttggtttaaggcaaacatggcaaaaccttccagcgttttttctaagaagtcatcttctttatccatgatgtcttcaaagaaaaggttcggtgacttgccgccaagctctagcgtgactggaataatattttcggtcgcatattgcatcaccatttgcccagtttgagttgaacctgtgaacgcaatttttgcaatacgtgggtttgtcgctaacggacggccaacttctgcaccgaaaccattcacaatattaagtacgcccggcggtaagatatcttggatgagttcggcaaccaacaaaatacctaccggagtttgctcagctggcttaatcaccacacagttaccagccgccaaagcgggagcgagcttccatgcagccattaaaatcgggaagttccatggaatgatttgaccaaccacacctagtggttcatggaaatggtaggcaatggtatcttcatcaatttcagagatgccgccttcttgagcacgaatacatcctgcgaaataacggaaatggtcgattgcaagtggaaggtcagctgctaaagtttcacgaactgctttaccgttgtcccaagtttctgcaaccgcaagcatttcaagatttgcttctaaacgatcagcaatttttaaaagtatattagaacgtgtagtcggtgaagatttattccatgaagctttcgctttgtgtgctgcatctaaagcaagttcaatatcttcagcactagagcgtggaatgcgtgtgaaagcttttccatccactggtgacacattatcaaaatattcaccctttagaggtgcaacccattcaccgccaataaaattttcatattgtgatttaaattgaacttttgaacctggttgatttggatcgatatagcgcatataaatattcctttgcttttttaggactaaagactaacaagaaccctgtcagtaagtactttcgtactttgtataattaggatataaagaagaaggttggagaaaggttggaatagaaatgtgaatatataaggaatttacaaatgttcacaaaaaaggatttattgcagcaacggatgttgattgatcaactgcgcacgcaaaatagtctctctcctcagaacgctgccaaactcggccaaagtattgcgagctcgtgggaacgatcagcttctgctgcgattcctaaagaacgatttgcagcacctctacttgaaagaaaatctgcttcacaaaatgctttagatctggcactaagccagtgttctgatgacttacgtcatattgcagagcagtcttctatggttattgctgtgggtgacatcggtagtaccattatctggacagcctcaagtgctcaaatgcagagcgctgctgaacgtgtacattttgtacaaggtggtcaatggcgtgaagaatttgtaggtacgaatgcattggcgttatctttaaaaactcaacaatcaagctgtgttttttccaatgaacattatatggagtcgattcacgattgggtttgttatgcggcacccattatcgatccctactcaaagcaaaccttgggcgtggtagatttatcaaccacatggaaaaaccataataccttgggtattttggccgctgagcgttgtgcctccattattcaatctgctttgttagaacaacagcgccagcacttacacatccgggcattttcgacgccgcaagttaaatttaacgggaaaagtttattattgacgccgcgtcaaattgaaattttaacgatattggcactatgtccgcatggtttaaccttagagcatctctatcaggcactttatggtgagcgtaaagtaagcatgggtacgcttaaagctgaaatgtctcaattgcgagatatattgggaggtttgcttggttcacgtccatatcggttacttgtgcatgttgaggccgattttttacaagctgaacaagcgcttgatgctggatatgtcgcctctgcattgcagctttatacaggcgtatttctggcaaaaaccgaaagtccgtttctgtgtgcatggcgtgactgccttgagtcgcgcttaagtgatgcgatttttaaaacacaagaaacagatttattacttaagcatttagctcattttcccgaagcaatcgatgcggtagaacgtcttatggagttattaccgagtgaacatcctgcgcatcaattgctggtgaaatatattgactcacctaagctaagttaggtgactttttgatccagccattggaatagttgctgatagacttgttcccgtactggctgggccgaaaggactaaatcgtgtaaaccattgtgaatagagactacagagacatcgcctttcatttttttcccaaatttagcaatgtctttaacgtctaaaatgacatcgctttgagttgcatcgggtccccatttgcgtgggtttttagtttggtgcgaatgcataatcagggctggaatattcaatttaacaccgcggtgaatttctttttgcgcagtatgaattgcatgtacaaagctgagttgaactgtaggggcagaggttggtttccaatcgaggttgaaatcccattcacctttaagctgcttatgaagactggtggtgtaccatttgttcagttggcttggaaatttaacttttggcagatattttcctactcgactgagcattggaataccaaacttcttttcgactaagcttaaattaaaatcgtaaaacggactattcgcccagagtgctttaatgaggggatgatcaggatgatgcgcagcataaagcgttgccgttaagccgcctgttgagtgacctgcaagtaaaacttgtgtatgtttttcttggccaataatctctaatgcttgagtaatttcggcatcatattcatttaaatcgagcacattatagaaaatttgatgaggcagttttgagcggccatattttcttaaatcgagtgcatagaagtcataaccatgggcattaaattgctcggccatttcggtttgaaagaaataatctaaaaaaccatgaatataaagtaccgctttttgagttggttgagtggcttttttacgaactaaggtggctacaactttaccttcataatcatctggaaagttgagcgttagctgctcatagccggcacctaaaatatctggggcataattgtgtttagctatagatgtattcatttttatcgagctattgtcattaagtcatgttgagtatccttcaatgaaatgggcaaattgtcaatcaggtttagagaaggttggagtataggttttaaaaaaagggaataccgctggagctaagtattccccaaaaagtaagtcaacggtcggagggatttgacttactacaggaacatagcgttacatcagtattaaagtgctgctttgaaaatctccacaacttgtgcatggtttgctttacgtgggttggtgagcatacatgcgtctttttgagcgttttcggccatcaccgcaaggtcttcggtttttacgccaagttctgttaagccagatgggataccaattgaagaagacagtttacgaatggcatcaattgcagcatacgcagcttctgttacggtgagaccgtgcgtatttacacccattaattctgcgatttttgcataacgatctggacaagcaattaagttaaattcacatacatgtggtagcaagattgcgttacatacaccatgaggtaggttgtagaacccgcccaactggtgtgccattgcatgaacataacctaaagatgcattgttaaatgccatcccagccaagtactgcgcatagctcatcgcatcacgcgcttcgatgttttcgccatttgcgacagcaggttgtaaccattgactaatcatggtgatggctttttcagcacaagcatcggtaattgggtttgccgccgtagatacatatgcttcaactgcatgggttaatgcatccatacctgttgcagcggttaaaccagccggttttgcaatcataagtttcgggtcatcgatcgcaatgagaggggtacaacgccagtccacgatagccatttttacgtgagtatcggtattggtaataatacagaaacgagtcatttcagatgccgtaccagccgttgtattcactgcaatcaatggcgtcattgggactttacttttatcgatgccttcgtagtcacgaatatgaccaccacccgcagttactaagccaatcccttttgcacagtcatgagatgagccaccgcctaacgacacaataaagtcacagccattttcgttataggcattcacaccgttgtggacattaatatcggttgggttaggttccgcgcccgggaaaatatggctcgctacgcctgcttcggttaaatagcttgcgataagatctgcaacgccaaatttaaatagcccttcatcggtcacaattaatgctttttttgcgccgaggttctgcgcctttgttccaatttctttggcacatcctggtccaaagagtgatacgcaaggaatataaaaaccgtttgtttgatctgcaatatttttaaaagccatggagtgattcctttttccataaatccattgtttgttattacaggtgagcctcaccatggccttagtattgtgatgtgtagattattttcctacctaccaaaaacctaccaaataccaacttgatattagttattgatttatattgtttttatagaaaatttggctcattcatttaaatttttcgggaaaatcgttaagctatgggctgttgaagatgtacatatgagattatgaaacaggaaactgcacttaaactgctaaaagcaggtgaaaatgtttttttaaccggttcggctggtgcagggaaaacctatacactcaatcagtacatccattacctaaaagcgcgtaaagtacctgtagcgattacagcgtctaccggtattgctgcaacgcatatgaatggcatgaccattcatacatgggctggtattggcatcaaagatcatctaactgacgatgacttgaaacgcatgaaagagcgtaaatatctcaaggaacaccttgaaaacgcgcaagttcttgtgattgatgaaatctcaatgctccatgcgaagcaacttaatctggtcaatcaggttttaaaatattttaaagaaagtgatgaagcattcggtggcattcaagtgattgtagctggtgatttcttccagttgccacccgtaggccgtaatggtgaagccaatcgtgacaagttctgttttatgtctgatgcatgggtcgaagccaaatttcgggtatgttatttaacagaacaacaccgccaagatgatgaaattctgaatcagatattaaatgcgattcgtgcgcaaagtattcaaaccgagcatttgcaagctttgcatcaatcccgtactcatgacattggcgaaacctttactcgtctttatacgcataacatggatgtcgacaatatcaattatcagcacttaaacgaaattgataatgaagggcatcaatttaatgccgttttagacggtaatgaaaaattattagaaactttaaagtcttcagttcgtgctccggaagaactcacacttaaaaaacatgccaaagtgatgtttgtaaaaaacaactttgatatgggttatatcaacggaagtttaggtgaggtgatcggttttgaagaagatgacgaaaatgggttattgccaaaagtaaaattaactgacggtacaactttgctggtagcacctgaaacatggtcaattgaaaatgaagcaggaaaagtcattgcaagtttccagcaaattccacttcgtttggcgtgggcgattaccattcataaaagccaaggtatgactttggaagctgctgaaattaacctgatgcatacctttgaaaaagggcaaggttatgttgcgctctcacgtttgaagtctttaacagggttaaaattattaggttttaatgaacaagctttggagttagatagtctggcggtaaaagctgatcgccgttttcaagaactttctaaagaagccgaagataattttgctgacgtcgatttaacggctcaacataaagcctttattcgtcattgtggtggaaccttaaatgaaactgaaatttcaagaaatgagaaaaaactagcgagaggcgagaagcaaaattacgcctcagcgactttggacgaaactcgtgcattgtttgaagaaggctacgaaattgaagatattgcacatgaacgtggtctaacacctgcaaccattattaatcacttggctcgactgcataaagaacaaaagctagatatttcggttgcccatcctggtgaagaagtggtcgaagaagtgcgtaaaatttataagaagttgaaaaaacgccaaaatccggatcatttttctgatgatggttcgatcaaactaagaccaattgttgaagcaaccagccctcgaatgggatatgatcaggttcgattagctttattatttattgaataaagtttaattggcttaatgacttattatataaattgaggtggctatgccgcacgttgtagttgattattcagataacttaactggactaaatgcaaaacaattacttgaagaaattaataccacgctcattgaaacagagttgtttagtccagaagacattaaaagtcgtgcgcgtagagatgaggtttttctgattggcttaggggttgatcaagcctatatccatgtaaaagcctatattttgtcgggaagaactgctgaacaaaaacagcttgtgggtgagcaattattagcggcgctcagcaacaaaaaatatctaccacaagagtttaataaagaaattcaattgtgtgttgagcttatcgacatgccaagagacgattattttaagcaagttgtataactctaaaaaacgcaatttcgatcaagaatagcaatgagcactatgtaaaagtagtgctatcgaatgaacagacataaatgtatggctgtatatactcaaaagctgcaactggtttgcgattatattcaaagacatttagatgaagacctagatgtcgatcggttgagccagattgcggccttatctaagtttcattttcatcgtatttttgccattcacgttggtttaaatgtgatgaagtttatccaactttctcgtttaaagcgggcctcttttcaattggcttttgaacccgatctcaaaattattgagattgccttgcaagcagggtttgacagtcccgaggcatttactcgtgcatttaagcgttcatttgatcaaactcctcgggcttttagagataaaccagactgggaatcttggcaccagaagtttgtttttacgattccaaaaagtgagctaaaaatgaatgtaaatattgttgagcgacctgctgaaaagattgcctatctatcacatttaggaagtcccgataaagttttggaaactgctgcgcagtttattgcttggcgtaaagaaactggcttatcgcctgtaactaagtctaaaacttatggtattccttttgctgaccccgatcagacaccagctgacgagtttcggtttgatatagcaggttcaattgaaaaggcggtacctgaaaatagttacggcgtacaaacaggtgaaattcctgcggggcgttatgcaaccgtaagacattttggtagccatgaccagattaaagatagcgtctattacatctttagaaactggttacctgagcaaccagaagaagcaggggattatccggttttctttcactatcacaactttgtgcatgaagtgaacgagtgcgaccttattaccgacatttacttacttttaaagtgagtctagggtgatacagacatagcttaggttatgcctgtatgtttaaaagtttgatatctgcatattgttcaatcaggttgtcatctaacatatggatataatccataaagatgctactaaagcttcccatagtttgcgcctgatttgctgcaagtttacctgcaattgcaaaatgaacatgagctgaaagagccgcaatggttggtgttgccacagcgctatatgctgcaattaatgcacccaaagcacagcctgttgcagtaattttaggttgtaaaggacttccgccgtttacttgaatcacagcatctatttcattagacaatatataatctgactcacctgaaatagcgatacagtctgcatgtgctaatagtgcataagcctgttgataggcctgatcactacttaaggtactatccacacctttagattgaacttgattgcctgcaagcgtactgatttctgaagcattaccacgaataacacttggcttgaattgtaaaagctcgtctgtcatttgactgcgccaagctaaaattgggccatagcctaccggatcaagtacccaaggaatattgttaagctgtgctgttttggcagagatttgcatggcttgcatttgctctgaagtcggtgtacccaaattaatgcttaaagccgatgaaattttggtaaagctttctgcttcataaggattatcaatcatggcaggtgaagcaccggaagcaagtaatacattggctgtatagttggcagcaacgctgttggtaatacattgtaccagcggcgtttttgcctgcatgttttgccaagcttcaatcacctgttcaatgaggttggatgtcgaagtcatctgataatccttattaagccagagataagaaagttaacgggtaaaatagtgatcttgatgtttgcaattttggcaaatcaacgacacataatctgctgcatcatagtcaacacttagatcatttgaaccacagtacatacaacgtttaaccgagtaaaagtttaaacgaggttcgatttttcgccatgctttccatacaggttgtacaaatatctgttcgtcataacctaaaaagcggttaaataatatatggctcattttactgtaaggaatattgtaagggcggggcaacatcgaagtttcccacttttcagtcaaagctcgttcccgatattgctctaaagttttctttaatagattggtattaataaacttttcatttcgtggctgtagtgccttttgtttataaagatattcaagtgcagtctgaataagataataaatttgaccaatcgccaatgagtccattaaacggtagcaaaaggcttgaaaattagagcttcctgcaatttggataccccaagttcggcaatagaactgagagaactgaataatttcttgatagagcacctgaaacagcacgtctttcacttcatcggcactacgaaatggaataccaagacttaggttttcatagaaccagtggcgtagttgctgagctacactaaataaactcgggtcgctataaccatctagacgaatatttaaataaaagcactgtggttcatcggtttgatcttgtgcatttaaaatcccatctttatgaagctgtttaatgagatggttctggaacatccagttaggggtaatcggctgatattttatctggtcccaatgaatgtattcatcatgtgcaatgtcatcacgagcatagtcatcaagtaggctgagtaaaaaaagtttatgtaaaaaacttagttgttccagactgcgctgaggttggtcttttgacttaaactggcgttgttcttgtaaacgagtttgttgtaaaagttttttccgttgtttagtgcatgtttcacaatgacaagtcatttttgtgtctttaaatacacggtgttggcaatggctacattcatgaaattgaacgtcttgctcaaattgttcggcatctacccagtacatcgacgcttggcagagagggcaatggctactttcatctagctgtttttgtagaatttgtaaggccatttcgctccgaacgtttgaattaatcatgactgacctattatacacagccgcattgccgatagatgagattgtctttttgtttgatgcaaaaatagaaaacctaaagtctttgttttgactttaggtttttataagaggttaaaagttaagattaaacagggcacggcaaggtctcatcattttgtccaagttttttggcattgatcagtgcctgcacttttttatttggtaatttcactttacctaaggcgtcatacgtattaacgatagtggttacctcctgagcagtcattgaaataccttcggcagacaagaacacggcaattacatggtggttgagtcctgctgcatctagatcatgaatcgctttaatgttttctagtcgatgtaaataagcttttaattccatagtgagttcctcttgttctgattgaaatacttatactggtatattggataaggcaagaaccatgcccaaaatgtaagcagctcctcaaaaatgttaaaagcgaaaggagttttatttttattgtatagattgattatataaacagcgattatcgtaattttggtctaatctgtgctaataaaagacgattctaatttgaaatgtataaatgaagtcccattaattttataaaggtaaacaaacacagtatgtatgaatgtgtatgatcaagttcataaaattcgtactacggtttccaaaagtatataaggaataaagatgaatattgcggcgcagcctccagttcaggcagatcaaacagtttatttaaaagattatcaaaaacctgcgttcttggttgaatcaattaatcttgatattcaagtctatgacgataaaacaattgttgattcaacattggtcatgaagcgtcaaactgctggagacttagtgctactgggccgtgatcttgagttgcaatctattcagctcaatggccaagatcttactcctgcacaatattcactcgatagtgaacaactggtgatcactgatgcaccagatgaagtcattttacaaactcaagtgattattcaccctgaaaccaacactcagcttgaaggtttatataaagctggcgacttatttgtaacgcaaaatgagcctgaaggtttccgtaaaattacgttctatccagaccgtccagacgtactttcagtttttactacacgtgtagaagcagacaaaaaatatccggttttacttgcgaatggtaacttgcttgaaacaggtgaagttggtgaaaaccgtcactttgcgatctggcaagatccaactaaaaagccaagctatttgtttgcttgtgtgattggtgatttagctgtattgaaagaccgctatacgacttcggaaggacgtgatgttgctttagaaatctatgccattgagaaagacattccaaaatgccatatcgcaatggaagctttaaaacattctatgcgctgggatgaagagcactatggccgtgcctatgatctcgacaactatatgattgttgcggtgagccagttcaacatgggtgccatggaaaataaaggtttaaatatctttaacacctcatgcgtacttgccgatgaagaatacacaactgacgcagcgattatgcgtgtacagtctgtgattgcccatgaatatttccataactggacagggaaccgtattacttgtcgtgactggttccagttgtgcttaaaagaaggcttaacggtattccgtgatcaatctttctcggaagatttacaatctgctgcggttcaacgtattgacgatgtcgctgttcttaaatcgcatcaattcccagaagatgcaggtccattgtcgcaccctccacgcccagaccactttgtcgaaattaataacttctatacagcgactgtttatgaaaaaggtgcggaaattaaccgcatgatgtcgacattactgggtaaagaaaaattccgtcagggaacggatgaatatttccgtcgtcatgatggacaagccgtaactgttgaagactgggttgctgcactctctgcgggttcaggtgttgatttatctgcattcttaacttggtataaccaaccaggcacaccaaagcttgaagcgaaaggtgaatatgatgcagcagcgcaaacttatcgtctaagctttaaacaaagcctaaaagcgcatccgaaatatccaaacttaaaagctgtcccaattcctgtagcgttggcattatttaatgctaaaacaggtgaacaatatacgctccaaaacgaaagcctatttgtaaatggtgttaaagatggtgtgtacttatttgatcaagatgaagcaactattgagtttacaggggtaactgagcaacctgttgtttcactactacgtaatttctctgcacctgtaaatctggtatttgattacagtgatgaagaattagcattcttaattcaacatgaaacaaatggttttaaccaatggcaagcaacacaaaccttgcttgaacgtattttgttagaagatcactctgcggatacctatattcaagctattcaaagtacattgcctgaattagttggtcgtgatccacttttagcatcgcgtttgtttgatgtaccgactgaaggttatttgggtagccgtattgatcaaaactatgcaccagccgatattcatgtaaaacgtgaagccttactcaatcgtttggcacaagagttgggttcgttctggaaagatacgtaccttacattggaccctgacttgcaaaaagaattttctttagcgatgggtgtacgtgcattaaagaacattatgctcatgatgatggcgcgtcagggtgatcaaagtgcatttgaattggcttacgatcaatatcaaagcacagggaatatgtctgaacgtttaggcgcgctgcgtgtactagtgtggcaaagtgcgcctcaagcacaagaagccctagctgatttctataaccgctttaaagacgaagcattgtctttggaccaatggtttatgatacaggcagcaaacccaaatgccacagttgagacaattgaatatctaactcagcatcctgattatgacttaaccacaccaaaccgtattcgcgccgtgagtggtggtttgtcaaataaccctgaaaatacatggggctttggtgtagctcactttattaatcttgcagaatatctggacgagaaaaacccgattttaggttcacgcttattacaggtgttatctcgctggtatacacttgccgaacctcagcgcactcaagtgcaacaggctttacaagcgttgcagcctaaagtgaaatctaaaaacgtttctgaaactttaaatagtatgctgagcgtttaattagattttctgaattattcatgttttcaaagcgctatttctttaaaaggggtagcgcttttttttatattttgaaacttggtcgtcatcaaaaatagtttgacttaaaaagacattctgtatatttaataattagttccaaaaaggaactgagagcaaaacaggcaattaaaaataaaggtgaataaatgtcggatattattttgcatcaatgggaaatttctccattttgccaaaaagttgcaagagctttgaaatttaagggaatcccatacgaaacgattaattacaacggcattcttggagcgaaagttcctttgctcagtaaagtgggcaaagtacctgttattgaccataaagggcagcgtatacaagacagtacccgtatcgctcgctacctagacgaaacttttccggatacacctcgactttatcccgaagacgcaaatcaaaaagcacttgcagaactttgggaagactgggcagatgaatcactctatttttatgaagtatatttaagagtaaatgattcggaagctttagaagaagcaattcgtattagcagtattggccgtcctgcatatgaaaaacctatggtgaagggttttattttagctgaactaaaaacacagcttttctttcaaggcttgggcagaatgaaggctgaaaatgttgaagaagaatttatacgacacctcgaccgtgttgagcaggttttatcacaaagtgaatggttagtgggtgagaatcaaacgattgcagacatagctgtagttgctcaacttggtgaagtcattcgtacaagtaagaagtttggtaaggaaatcttggatcgtccatttatggcagaatggtataaaaaacaaacaggttgagacgactatggcatcagcaacaccagataaaatacgagattgtgcagttgttattggcgttggggcatcacagggcatcggtgctgctgtctgtcatcgctttgcaaaagagggcttaaaagtttacgttgctggacgtactttccaaaaaattgaaacagtagctgccaaaatccatgccaatgcaggtgaagctgtggcatttcgtctagatgcagaagatatcaatcaagtacaggcattgtttgacaccatcataagtcagaatgaacgcattactgcagttattcataatgttggggggaatattccctcaatttttttacgcagtccgttatcgttttttactcaaatgtggcaatccacttttttatcagcctatttagtttctcaaagctgtttaaaaatatttaaagaacaaaaccacggtacgcttatttttaccggagccagtgcttcgttgcgtggaaagcctttttttgcagctttcactatggggaaatctgccttgcggacttatgcattaaacttagctcaaatttataaaactcaaggcattcatattgctcatgtcattattgatggaatggtggatggcgacagaattaataaagctttatttggtctaggacgtttcattcgactcacacggggaacgggtggactcaatattaatgccatagccgacaactattggatgctctaccagcaaagccctgagctttggacacacgagctagatttacgcccataccaagaaaaattttgagagactcatatgctaaaaacaatatttcagaagtttcaaaaaaagcagggctgtgtagttattgcaggtcatgatatagaactacttgaccagaactttgtaattttagacaaaaatgagcaatctccattgcatgtctatcaagctgtgcatgattctagcgttcagaatatacaagtaaaccgtggaaatgatggcataacgagtgtccgtttaaacttggtgaatactgagcatttaaaaagcttactaaaatatattgccagccatagtcataacattgagttatgcgtgtttcagccaaatttttcatctgcgccaaatattgaagctttatctttagaagaaattgagcacagttggcaaacaacgggtttaagcgcagtgagcgtgtcacaagcagtgattaaaccaatgctaaagcagcagcgaggcactgttatttttcttggagcgccatctaataactcggctcactacgatgtgttaagccaaagcatgtttgcgagtattcgagcgttatcacagtcattggcaagagagtttcagcctaaaggaatacacgtgacatattgcatggtggaaaaatgggatgggcaaaaccagcactttatttcatctgttaaacaagtctgtcagcacatctatcaacaacctaacactgcatggagtcaagagcttagcgtgtcttgagattttactttcgagtgttcttaaaatagagtactgctttggaatgacaacagaacaataattttgaaggtacttaaatgttaaatattaagaatattcaacaaacggttaaagtagcgactacagtggcagctttgatgtgcttttcttcactggcacaagcatatcaatatgagcaaaccgcgcgcttaattaacgaacgtttatcttatatgaaagatgttgcaggctataaggcagagcagcatttaccgattgaagatttaacacaagaaaagaaagtactcgatcaatcgctttctgaagctgactcttttgggcttaacagcgaaacagtaaagccatttatagtggtgcaaatggatgtggctaaagcaatccagtaccgttatcgcgccgactggttgtcgagtccggaaaccaactggaagcctcaagacttaagtgaagtacgcttaaaaattagcgctttaaacacagagctgctaaaaaatatcgcctatgaacttaagaaaaataataacaaagcgcctcatggctgtagctatatgtggcctgttcagcatcctcaacttaaagaagctgacaagagggctttatgtgtaacattgaataaaatcaaattaaaacaatgaaccacccaaagccctccctataagtaaattattcaatcaacattaaatcggcagtattggcagatttaagtggtcgtaaagcaaaggttgaacgcgtgtggcggattcctttaatcgagtagagctttttacgtaaaaaacgttcgtaatgctcggcatcttttacggccactttcaccaaataatcatagtcgcccgtaactaaatgcgcttcgaccacttctggaatgtctgccaaagcctcgctaaagttttctaacatttcatcatcgtggcgttctagggtaatttcaataaaaaacaactcatgaatgccaatcgctttggggtttacgtttacggtatagccttcaataatttttagactttctaaacgtttgagtcgagtccagcaaggcgaagatgaaagcccgacttcttcggcgagctgtgcaaccgttaaacggccatttctacgtagggcagataatattttccgatctatgcgatctagtgcgtattctgtgctgttcaaaatataaaccaaagaagattcttctgttaattttaaatatacgtgatttttatgctgatatcatttaaaaaaactgaaaattcagtaaacattttgagcgacacagccatacactatttctatgcatcggactctactggataggagttgtgatgaagcaaagagcactgtttcagtaagggtgactaaacagtgctctttgcggattttacccaaaaatcaaatattaggaatttttgattcatactttagaatcatcaaatattggttcaataataatcataaatatattcttattggtcatagcgctcatctttccaaaaatcttattaaatatcctaaatggctaaatattattattgaaatttataaaagcacatactttaatccctaaccaaagtactaatttaacaattaaatagggaagtaaaataaagattatttatttgttaaaacttaatcacctaattttaataaggtgattaaatattcgaaagagaagaaggttatcctattttctttattattaatagacacttagtgataattattatttaatacgcccgcaatattatgactaatacttttaataactttgtcggggaaataatgcgtaattttttagtaacgattttcactttattagtaggaacatcaatttatgcgagtcaagaatctagaaatcttctagagcaaacacaatgcgaaaaagcagtagagcttcatggttttttaagccgagctcaacttgactgtaactatcactattattcagaagagttaaaagaggctgccgcaaaatgtactaaacatgatctcggcgaaaaatatggtagagaggttatgaaatttgggatgaaggaatttgaagagcggaagaaagaggatacacaaggccacttttgtcataaggttttaaaagaatttccaaaatatattaaacaataaaaaataaggtattaaaaacctcttctagcaagccgataagatggatttaattattcattttatcggtctataaatttactagttaaattagaaaataattcttaaaaaattagctaatataaaacttcaccttgttttagatctaacaacaatcattttttagtttgaatcccttattgtaaccataaaaataacatttccttccttggattagccgttcgttatgtattatggaggaaaaataagcataagtcggcattcaaagtcttaattaatatagcggagtacattttaagtttacttatatttttaaatttcaaaaataaaagattctggaatggatgactaaatcttaagtaaagttattttatagagtttttaaagctttatttctagccaatatcacattgacacctaaaacccctccgattatcctttgcctgctggcctacattgccagttggttttagcagaccattagccaaagaacacgaaaaagtaatcacttttttgtgggaatccctgcgtgccccctctgcggcggaacgggagggggacaccttcgggtgtgctggattctttggctccagtctgctaaccctctttcgtttcgccaccattatttagcagtaatgtggtgaaacttctttatagccaaaggagttcgctatgcgtactaattcttctcatttattggtttttgccaaagtctttctgtctataccacttaaacagtctataaagcggttgaatcgactttaggtttttgcaccttaaaaatcgttacgactcaaaaatcatagcaacaataaacccgagataggcgagcacatctttattgtgcggcttttgcatgtctgtttttagcgctcaatttaagagtgacggcatgtctatctcttttatatacaacaaaaaattattttaagcggtataactatgccaaatttagaagcttcatttagagcacttagagtgcttcacacagcaagagatttatttaaacaatacggatttcacaaggttggtgtcgaccgaattattgctgagtctaaaattaccaaagccaccttttacaactatttccactctaaagaaagactcattgaaatgtgcttaacctttcaaaaggacgggctaaaagaagaagtattttctattatttattcataccgtgaacttatggtatttgataagctcaagaaaatcttttttctgcatgccaacctcgaagggctgtaccgtttacctttacaggccatttttgaaatcgaaaagttttatccaactgcctacaaggtggtggttgattatagaaactggttggtgatccaaatacatcaattacttttaaccattaaagccacagctacactcgaagatgcctatatgtttttgtttgtgattgatggggcaatggtccagcttttgagtaaagatagaatagatgaacgagataaattattagattattttttaataatgatgtcctagactaaaaataaaagccccgataatggggcttttataatgttagttactaactaaaatctcaattaccacttatggctataagtcacttttaacgtcacaccatttgcaactaagtgactggtattatcgcttgttcttaataattggctatatagaggatagtacttgcggttaaacatattctctaaaccaatcgtcatggtgtcttttttattaagtgcaaagctactgattaaatctgctgttgtataagattttacatcgtagcgaccaaaactattcttgccgtttaggcggtaatcttctgaaccgaagtaagtggcttgtaaacggtttgtccaagtttctgttgggctataagaaatataacctgtgagttttaatggcggaatacggaagcctgtcatgtcttgctcagcaccattttgcggtttttcacggcctttcatccacgtaacgctaccaccagttccccaaacattggcatcgtcaagatagtcaaaagttgcttcaagaccagtgactttctctttggttctagtaagtgccagaccattgctgaaagactgcacagcgcctagatcagaagtagagtggaagactgctaagcttgatgaaaagttattgaagttccctttccagcccaactcatagttatcaacttttacaggttctaaaaatgaagatgataattcataatttttttccttatcagtattatctgcattacgaataattacaccaacatcgggtaattgaaaaccttggttaaacgatgcataaatcgagtgctggtcatttggagagaaagttacattagcattgtacaaccatgcatcagcttttacttttccaccttgatatacataagggtttggcttatatgattgtgtcttaggatcaaattgtgataatggaataaaactatcaatttgggcatagctatcttcatagcgtgtacctgcttcagccgaccattggtcattaaagcgatgttttagctgtacaaagccaccaacactttgtgtggtaagttcaggtaaataaatgagcttaccagtttttacaaaatctaggccaccagattggtcataaatatcaggattgaaagtatctaaaggcatttcgcttttttcacggctaaagtcaccaccccaaaccagtgaggtgtcacctaaaaactcaagcggtgtggtaacagttaaacggctaccgagtatgttattttcttgatagatctggtctacgtttccaccccgattcggatttttacgtgcatcaaatggtgaaaaacgggtaaagaagtcgcggtaataaatttgagcatcaaccttattgccaaaaaagtctttatggttataggttaaattgtagatctggttttcgtttttattttggtctttgagctttaagcctttaatggctttggctggtacggttccggcaggggcattcttcacacttgggtcagatgcataatctgaatcttgctcggcattatagtagtttgcagcaaactggacatattggttgtcatcaatatgataaccaagcttaccgccgatgctatagccgtcagaatcatataaatcgccctgacttggttctggagcaacacggtcgccacttgcatcgtacgggctaccaatacgctgataaccaaagtcgagtgcatagtcaaaagcgttaaagctgcctgtgaaatattgatgaatatcgccacttaaagcattagaacggaaatttgttaaaggtgtttgaagtccaacgactgttttagctgtaggttcgctaccagccgcttttgtggtaattgaaataataccgccagaagcgccaccgccataaattgcgttactaccgcgaatgacttcaatgttagcaatactttcagggtcgatagctgaaagacctcttgatgtgtcacgtgtcaggttcattggaacaccatcgaccaagatgagggcattacggccccgtaaagtttgaccataatcggtaatggttcggcttgagtcggaaaggcccggtacggctttagctaaaacagttgcaatatttccagatgaaccatttcttaaaagttcaatttgtttttcatctagcttggtcacttgtttggcagatgtagaaagttcatctgcacgtgaagcgttgattgtaattgtagggagtgcttcaggctttttttcagcatctgttgtctcagaaggcgaggctgcaaaggccgagtttgagagaaagatggctccaccaagtgatagaagtggaatgatattttttgcttcagacttcctagtaaaaagtttattactttttatcttatttcccattttctcgccctgagagtgattgtaaattcgtcgaattataaatgagaatgattttaattaataatattattaatctatataatagaagtatttgtggctcttaaataaacataaataacaaagatcttctaagagagttaagagttttgattaatttaatatatttgaaaagccttaaactttttcatatgcagcattcttaaggagtcaaaatctttttttatataggtacaaagagaagcagtgacttgagataaatatttttccacctattccatacttattaatctatttattgtctagtcgaatagtagtgatcaggttttatctaaatttacgattgaatattacttccttgttgtatttatgacgacatatgtaaacaagtcttaatctataacacatgaacactttaaaattattgaaaataaagttttaaggtgtaggttttggattttttaatttttatcgtgatcttcaagctgagttaagcaactatccttggctagaaatgctagtttcgctcacacttttgatcctttttgctgcattagcaaatttcattgccaaaagaattattgttcggggaatacgtcatttagtgactaaaattaagtcactcaaccagtcagtttttgcccagcatagtgtcattaagcgatttgccaatattgtgccggccattgttattatgaatggtattactaccgttccgcatttgtcggaaaaagcggttgctttggtacagatgggcgcacaagcattcattttcctcacgattgcgctcaccattagtgaattattaaatatatttaatttaatctatcagcgtaatccaaaatctagaaacaagccgattaaaggttatttgcaactcgttaaactcattatttttgttgtttgcggattaatgattttgggtacattcctgaaaaaggatgtatttacgttgttggctggcttcggtgcaatggcagccgtattaatgttagttttccaaaatacgattttgtcattggtcgcgagtgtacaaattgcctcttatgacatggtacgtattggggactggattgaaatgccatcgctcaatgctgatggtgatgtcattgatatttcattgcacacggtgaccgttcaaaactttgataaaacatacaccacgattccaaccaataaactagtgacagacacttttaaaaactggcgtggtatgagtaatgcgggctgtcgccgtatgaagcgttctctttatatcgatcaaactagcgtgcacttcatgaccgaagaagagcaacaaaaactcaaagattttttattgctagatcaatacctcaatgccaagcaatctgagattgacgaatttaataagcatttaggtagtcagtcacgttataacaaaagacgcttaaccaatattggaacatttagagcatatgttgaattctatttgcgccagcataaggggattgctcaaaatcaaacgcttattgttcgccaactacaaccaacgagtgaaggtctaccattagaaatctatgcatttaccaataccactgcatgggtttcttatgaagcaattcagtccgatatttttgatcatctgattgcgattttgcctgagtttggcttaagagtgtatcaggcaccttcaggccatgattttcagaaattaacagtagaataaacaactgttagcgtgctatctattttattttcaaatagatagcatctttttaataattttatacattaatttataactattcttagaaaattattattaaatagctgtataagttgactttgaaagctacatgcacattgtagcttaaaagattttaagcaaactcaatctaaaacttgcaggagtaaggcttaagtaacaaatttgacactttgaacaaagaaaatactaaatgtttaaaaataacaaacaataaagttgctttactaagatttgttaggtgagttggagtgtttgaatggctacagcaattgagaacagagctagacaacttaaaaacgctaaacgtggaggatatgcgccaaccattgccaaagacgtaaacaaacataaagtacaaaaaataaggagagctctagacgaagcccggcgatatgtgagtgaactaaatgacgaaacggttatctttgacgatcaggacgcaaggcaaaaggcagaaggagccaaagcaattattgaaatgtttgaagcagctttaagcggtgcgtgagcagcatcaaactaaaacataatcataaaagaccttgctgaaacacggttaacgttctagccccttgactaggcaacttggttattcagcaaggcagtaaaataaaaataattcaaatatttctatattctattttttactcaaaaaaaccaaaaaaataccggtcaaataatattattgatgagcttaatttttttagaaaattattactaactataaaaatttttcggagttaaaatgtgatggattttacatttttattcattgctgtggttcgttatggaagtcagtttcagaacactcttatagattacatttggtatttcaacacttacatattgcaataatatattcatcatacttccctaaaagtctgatcaatcgcgatggtcaatataagagggaaggaaatatgccaaaatttctaataattgccgagaaggtttataaaaaactagaagaagataaattgttttcagataacctgatcgaacaactaaataacttggtcagtattattcgtaaagagataaagggaactccctgtaaactcaaatacaattttatcgattttgaagaatgcctaagtaaacccttaagtgaatgcacgattaaactcgacatgagtttaatgcctaaatataagaataagggtgaatatattatgtggctagcgagctttattgaaagaatcacggttggcgggcagccaaaattaccaccactttcaagtattgtgccagccgactttaacgtaaaaaaagaagctcagacgatagttgaaaataaaaaatcagtatcggaagaaaatgcaaagatgattgtgaattattttaattctgaagaatatcagaaaaataataaaaaaataaatctggtttaaaaccatataaaagtgtgtgtccaccgcacttttataatcgctggaaaatttcagcaaccgccttctggggcggttttcttttgccatatacatacttaaacaattacatcataaaaaattccataacttatctgtatagcatgttaagtttttctacacatctataaaaattacggaagggtttaaacatgaaatgttcatatcaagatctagatggaaatatagtcgaattaacatgtgaaagttatatacatataccgtcaggtgccagtggaaataaattgggaatagataatagggcagaagacttaatacatatcactgaagattttagtttttttaagaaaacagaggcagattcaataccactctatcgattcgctgtagatgctaattacaatgtttttaatagtgatgagctaccggctttggcccaaattggaaccgattggaaagtgcttaatgaataactttgcgattgttaggtagcctataagctagagctttaatattttgtaaaatttatcgaatagtaaatatttaacttatcttaatacaggtattataaatagcgaactgaaaatatagtctaaatatttataggcagttttagactagatgttgattatatagagagaaagaacatgaagcgccttattatattatttctattagcttatgctacaagctcctttgctcaagtgccattcgaagtcagtaaaagttgttttgtagtgaatggtagaaatattactgagccttgcttactttcttctacaaataactcgacatctaactttgaaagattaacttttgctaatacaaaagtttttattaaagaatcaaatatttgttcaaataacgattcatgtgtttctgtaggaagtaatttgtcgaatttaaaagatgcgactatttattatcgtgatttaaagactaaaaaaattattgaaaaaccggaaaaagattcatggacctgttttaagcaaccaattgataaattagacttttgtatttcttataattaataaaatctaattttaataaagaaaattctaaattagtcttgggcattaaatgcttcatggtagcttacatcacctttaggaacataattttgaaaacttaaggcttggaagtattcagggggcactccaggtagttttaggtcagggtatgccttaaaaccaaagcgactgtaatactttggatcacctaataaaacacaaccttttgcgcctgatttttttaatttttctaaagagctattcataagcaatgatccaatgccttgtccttgcttattcggcgcgacagaaataggtcctaagccataccaattcttttcacctgatgaaatttgcactggtgaaattgccacatgcccaacaatagtattatcttcaaccgcaactaaagagactgtaagttgtttgtgctttcttaaactattaacaataaagtgttcagtatggctcgtatgttcagcatttagaaatgccgctttagtcaattcttcaatttctttaatatcttcttctcgctcatcgcgaataaaaatattcatcttaagctctgtacacgataaaaatagataactcattgaaataatgtcataataattgttttctaacgacgaatactatgacacatctcaatgagttatatcttatcttaaacaaatatctaaaatggaacaagtcacatttaaagtgctttgcgctcatcatgcttgtgattattttaaagcaaacatgtaatctttcttctgcatctaaagccttgcccatcaagtgcttaccacaatcattttatcgacgtatgcagcgcttctttgcaggtcagtattttgattatcgtcaaatttctcagttgattttcaatatgttttcattcgaccaagtgcaactgactttagatagaaccaattggaaatggggaaaacgaaatattaatatcctgatgctcgcaatcgtttatcgtggaatagcgatacctatcctttggacattgcttaataaacgtggaaattcagatacgaaagagcgtattgctttgattcaacgctttatagccatttttggtaaagaccgtattgtgaatgtgttcgcagacagagagtttatcggtgagcagtggtttacatggttaattgaacaagacatcaacttctgcattcgtgttaaaaaaacttcattgtcaccaatcatttaggaaagaatcataaaattagtgatttatttcgccatcttaaagttggtcaaattgaatgtcgtaaacgacggattttggttggtcgggtgaaactatatataagtgcactacagttagaaaatggagagcttttactcgtcgtttctcctcagtttaatgccaatgctattcaggattatgcattacgctgggaaattgaaaccttattcagttgtctcaaaggacgcgggtttaatcttgaaaatacgcgcttgacagaccctagacgagtgaaaaaattgattgcggtgttagctataagcttctgttggtgttacttaacgggtgaatggcaacatgatcaaaaaaaagcgataaaaataaagaagcatggacgactctcaatgagtttatttcgctatggtttagactatgttcaaatggcgattcagcgtttaattggttttgggaaaaaagaagagtttaaggaaattttggcaattttaagaaggcagaaccctgataggataagggttctgtgaaatttgtcgtgtacagagcatcttaagtttgatccgtttttctcagctactcttttatttttagcatcaataggcttagttaggaataaatttcaatcataaaaacttgtataattcataaataaaataaatgaaagtaatattgataatcagtatcaaatgataattattctttgtattattcatgtaattttttaaagctacttaaagattatgcaaaggactacgaaacactttcaaattaatgcattagcacttgctatagcaatgagcacaatttcagcgcatgcagagactgatcagcagacttcggaatatggaactcttcctaccattaaagtaaaagctggaagtggccaagaaaatgaaaaaagttatatagcagggaaaacagatacagcggttccactgggtttatctgttcgtgaggttccacaatctgtttctgtcattactcaacagcgtttacaagaccagcaattgtcaactttagttgaggtcgccgaaaatgttacaggggtaagtgtcaaccgttatgaaaccaaccgaggtggaatctattcacgtggttttgtagtagataactatattattgatggtattcccaccacatatagcttgccttggtcttcaggtgaaattttctcaagtatggccttatatgatcatattgatgtagttcgaggggcaacaggtcttacatttggtgctggaaatccatctgctgcaattaatatggttcgtaagcgtgctacgagtacagagccaacagctaacgtagaagtgagtgcaggtagttgggataattaccgtgttatgggcgatattgccaactcccttaatcaatcaggaacagtacgtggacgagcagtggcccaatatgaacaaggcgacagctataccgacttgttgtctaaagaaaagctatctttattgttaagtgctgaagcagatttatctgaaaatacccttttatcgggtggggtaacttatcaggaagatgatccgcgtggaccaatgtggggaggtttacctgtctggtttagtgatggcacaaaaacgaactggtctaaaaatatcactacaagtgctgactggacacgctggaatgttaaatataccaacctatttgcagatttaactcataaatttaatgacaactggtcagctaaactgtcttattctcatggtaagcgtgatgctaattctaagcttttatatgtttcaggtagtgtagataaaaatactggtctagggctatctccttatgcatcagcgtatgaccttgaggtagagcaagataatgcttctttgcagctcaatggtagttttgatttgtggggcttagagcaaaaggttgttttgggttatcaatattccaatcaggactttacagcgtatgctcgttcaactgatacaaaaatggaaattggcaatttctttgaatggaacggcagcatgcctgagccagtgtggaatgcacctacactcaatgaaaaatataatattgaacaaaatgcactattcgctgcgacttatttaaatccgattgagcctctaaaatttattttaggtgggcgttttacaaattatgaaaagaatatatatggtcgtagttcatccataaaatatgaccacgaatttgttccttatgcaggtattatctatgatttcaatgatgtctatactgcatatgcaagttataccagtatttttcagccccaagataaaaaagactttgatggtaactatttagacccggttgaaggaaacagtactgaagtaggcctaaaatccgcatggtttgatggacgtttgaatggtactttagcactttatcatattaagcaagataatttagctcaggaagcaggggacgtcactcgtaacggggtaaaagaaatctattatcgggcagcaaaaggtgcgacgagtgaaggttttgaagttgaagtaagtggacaaatcacaccagactggaatattacagcaggttatagccagttctctgccaaagatacaaatgatgtcgatgttaatacccaacttcctcgcaagatgattcagacatttaccacctataaattatcgggcaaattagaaaacataaccgtgggtggcggggtgaattggcaaagcagtacctatattaatgccgaaaatcccaaagaagttattgagaaagtcgagcaaggagattatgcacttgtaaaccttatggctcgttatcaaattacaaaagatttttcggctcagcttaatattaataacgtatttgataaaaaatattacggtgttttcccggcgtatggccaaattactttaggtgcccctcgaaatgcggcgctaacactacaatataagttttaatgaagttattttttaagagcacctacgggtgctttttttataattctaaaaaagagctaagtatcaaaatagcactggttttcacctctattttttaccatttgataaaatttttttaactaaaattttaccgttcgtctgctaattaagataactaagtcatgaatttatatataaaaatgtgatggatttaacttaaatttatttgcttaaaaattatactaattgataaaaaatataacttggctatattccaagaacatattgcagagttagcaatatgcatttctaggatggaataaaaatgaaaataaaattatcgaaaatagtaatagccagctcattattgatatttacaaatatgagttatgcagagggagtaaaacggttttctgtctcggcaggttggttacatgtaatgcctcaaggtaaagctaatccatttaatatcaatacaagtgttaaaaatggaacagttgctaaagttggaagcatttcgccgaccagtttcttaaactccgttgatcctaatgctacagaggtagatgtaggcggtgaaccttttaatcaaaaagagtttcttgaactcgctttaaatgatgactttttaaaagggctcttacttgatgaagaaggcaatataaaacctgaggtagcaggtgaggcaacgattcaagggttagagcagtggcatcaaaatgatgctggccttgaagtagatgacacagacacattagggcttatgtttaactattacctcaatgacaatgtgtctttacaatttattggaggcattccccctaaagtcgatattaaaggccaaggtgaaatcttggcaccattaagcggtgtcgcgttgtcaccacatgaattagttaaaattctttttccgaacggcattaccttaggtcaagcagtcccgattaccaatttaggcaataaacctaaagcagctagtgttcgtgcctggacccctgcaattgaagcacaatatcaatttgggaagagtggggtgaacaagtttagaccttatttaggtgtgggtttaatgtatgctcattttaatgatattaagctaaatgacgaaattcgttctgacctgatctctgcaggtcatatgattcaaaatgtgttagatggtaaggctggggctgccttggatcgtaaagagtcgagtggaaatatggtggttaaagtagatgcagatgatgcgattgcacctatatttactgccggctttacttatgattttaatgattcttggtatacagttgcctcagtatcttatgcaaaactaaataatcgaacaaaaattgatgtcattaaccaaaatacgggcgctcgcttaattcatgggtcaactaaagttgatattgatccgatcattacatatttaggggtgggctacagattttaattttttaatcatttgaagcagtatcctgaagatgaattcaataaactaaaatctttgggatactttttcattttacatttctttgtgaacactacaaaaaagtctataaatctatgctgatcgtaatattgatagccagtatttataagctaatcaattaaaactgtatgaggtgagatatgactaaaattatcgctaccctaggtttagcagcaatcgtttcgctttctgtagcggcttgccaaggtgagaatgatactaaacagcaagataaaaccacgactccacactcaatggataaagactcctaattcttataaattttaaagcctatcgttagatgggctttaaaataactttgctgtgtcttgctattcctagctattgttagggatcaaactaatcttgcgttaataagacagccctacagaaaaaatatgaatcttcttttatatgtgccagttggtttccataacttgcattgaattaaatacggtttttataggacatgtacttaaagccactttgataaaatgactcattatggccattaccataaatttcggttgtaaaatttaaaggctgataagttaattttaatgacactcatttttgaatagcgatgaaataacttacaaatccaaacgctactcatcaaatctatacataaagttaaatttaataaaaattatctttcttataataatttaaaaataattttgaggactaaaaatgaaaaaaagcattaaaattttattattatctagtttgatttcatctataccattatctgtaattgctaaaaatgttgagactaaagtaagctttttaaaaggttcttctcaaactacattaaccggaaagtttcaaggttatgatgatgtaagatatcgagtttttgcaaaaagtggacagattttaaaatttaatattaatagttatggtaatttagcttatattaatattttcgctccaggtcaaaagcctggtaaagataagccattattcgtgggttcgactgtaggtttttcaggtgaagtaacgctacctgtcgatggtgattatattgttcaagtttatcaaatgaaaaaaagcgcacaaagaaatagagcagtttcttttaatctagatctacaaatattagataataaaaaataaaatgataattaaaagatttatataaaagctctaatagttagagcttttatataggcataaaaatagcgtagtgttaatttaaataaattgaatcaacaatcccgcatttttcaacaaaacttaaatcatgtgaaactaatagcacagaaccttcataactagaaatagcatttgcaaataactctcttgactcgatatctaagtggttttctggttcatcaagtaataaaagttcaggcataggctgagcatggctcaaacctagtaaagcaacttttaacttctcaccaccactgagttgagctaagggatatgtgcttttatcaccacgaatccgaagttgacctaataaatttctccactctaactcagaaatatttgggttaatatttcttaagttttcaacagcagagagatggtctaataaaaagctaaagttctgatcgagatagaagcaatttgcaaacagtttaatttcatctgtagcagttacagcagattgatcaatctgtttcagcaaagttgatttcccaataccatttcggccaaccaaatgaatcttttgacaagctcttaacgcgagatgaattggttgttgtgtcccatagttgagttttaagttatcaattctaagaatttctcctgttcttttgttaaaagagggaaatataaattgttggggcttaacagtttctagaagtacttttttactattaaagtcttgctggctttgatcgatttgacgctgatgttgagaatgaattgctcctaggctttgcccagcctgttcttttttaaaatcgagcaaaattttagcttgcgagtttgagtcacgaagtttgttgccagcacgctcacgtttttgagctttcattaaaacttcatgctgcttttgcttcatgtgcttaacttcacgttgatgctgatgtactgactgttctaaagcctcgatttgggactgatattgcgcataaaatttttcataatttcctgtagtgtgctgtaggccatgctcatttaagtgataaatatggtcgacttcatttaacaaagtcagatcatgactaataataagagcgcctactggatgtttctttaactgagcaattaaccactgtctagcttcttgatcaagatggttgcttggctcatcaagtaataggtaatgatcagtttttaaaaataatgcggataaggctaacttggttttttggccttcgctcaactgcttaacaggaaagtctaaatcggttggtagctgagcagatcgtagtaaagcttcccaaatattaggaagatcccaatgtccttctaacaaatcataatcatcgtatcgagcttcaccttgttccactctttgaaaagcgttgtaaagatggttgacctctaaagcttctgcaattgtgtctgattggagacgagtgagctgagataaatatgcatggtttgtttgccagtttatttgaccacttatatgcatttctgtagtgggtgaaatcttgtgaagcaattgcataagtaaagacttaccttgaccattgcggccaattaaggctgatacttgatgatgctcaagtgagaaattcaattctttaaacatcacttttgaaggaaactccaaagtgagttgtgatattacacatgcctgctgagtcataagaacctcataaatacaggatgtacaaaataggagtttaaagctttaaataaagacgctaagtcactaaagaatagtctattttgcacatcaaaaaagagaaaattgatgagaaaaaagacttacttcattggcgtgactcacaaaatagagggaaagagaacaatagtgtataacggtttttaagctgtgtaaaacttatgcattttttatgataaaaagcctaatcaatggattaggcttttagtcgactcagcaattattcttttaccaccaaaacttggattttagtgctgtttagaacatcttgcgcaaaactacccaaaataagtttttggaaacctttacgaccatgtgaaccaataacaatcaggtctgaacccaactcttctacagctttaaggatgccatcagatgagatttcaccttgaataatttgtgtttcaatatcaacaccttcttcagcacatagggcttttactttcgcaagtgttttttctgcattagcacgcgcttcaacaaaataatcttttacaacaggagagatgtaatagaaatcaacaccactaaacgggtccactgcaactagactaattgctgtaagtttactaccaaaagctttagcgatatgggcggcttgtcgtgctgctgccaaagaaatctcagaaccatctacaggtacaataatatgtcggtaattcataatgttattcctcttatttacaagttgttatatgtatgaagcttttcttacttaaagattaacacatttgtttaaaggtagaaatcaattcaattcacttgtagttaaattaaatggtatttaattatatatttgatttttaatgattttattagaggttgtttaagagggagttgagactatgccaaatttaattttttagaagaactttacaataaattacctttcatatttttgtcacacagaaatcgtataaccgaatcatatgtaagggggaagtagtaaaatatggccgatttaacagcaaagaaagtcagtaaacttatcgaggaatttcgccaaactggtaaagagccggaaaagctagtaattggatataaaacttatgcaagactcatggcagatgataagtttgcagaaaaagttgttccttcgttagaaaactcaaaagatcgattatataaaaatctaaaaataaaacttattactgaaaaacattattttgaagttaaataaaatataaatgtgatatttatcacatttatatttttgttgtttacatttagtaggaattattaacatattgtttttaagttgatacaaatatggggtgtaatcaacatttgaaaacagcattcctttacagactcgatagaataaattgcttttatttttaagtagtggaataaattgaatgccaagtattagtgtaattttattttatattttagctattttaggcttttgctctgctgtgggaggattattaagtttaagcatgtttttaatcatcatcggtattgggcttatttgtgcagcttttttgctaaaaaaagaatttaaaattgatgttttattctggaaataatcattggttataaatgattaaattaataaatataattagttctcacctcatacaaatgaggtgtaatttaaatattttaatatgatatatattattttaacttaaattgatctggcttttattttgcaaaaatcttattacaattctaaataaaaccggaaattaaaaaatacattaagtatttaaaaataaaaagatttcaattacgatgaaagaccaataaattagttactgtggcattaggtaaaaaataacaaaagcgaggtgaacacatgacctataaatatgaatatgcagggttttggttaagatttggcgcaatgatcattgatactcttattctttttttagcaattattccagccgcatggatcttttatcatggagattacgatctgatatttgctacaggtatgagtagtaaaccgcaaaactattggtttgatatgatcgtaaattatgcatttccatttttatatactgttttgtgttggatctactttgcagggacaccaggaaaacgtctaatgcgtttaaaagttctcgatgaaaagacaggtaataagttaactttcatacaatctctcattcgctatatcggatatattccatctattttagtgttttgtattggtcttatttgggtcgcatttgatgctaaaaaacaaggatggcatgacaagatggcgaaaacagtggtggttagagaactatgagttatagtcactgatgaattaataaaaaattacaaaaaaaatcttgtgccttgtagagtaaaacctatacttgccgcgagtttatttaacggagatcctaaatgggtagttgttcgaggttcgagtttaattatcaattaaaccaaagccaatactgagcaaggtaacctttaggagaggctatcttgcaatgagatagctttgttaaaaattagattaaacctatacaaattacttgatttgtaatcattcacttcagcatttatctgtttagtttctcgctagaaatggggagaagccaatgtttttatacgcttccatacacgaccgttatatctaccagattttaatcttggtaaacaattcgtctcatgcgattcaaagcattcggaccatgttcagttatgtgacattccgtcaacgttggtctggctttgggctaattttctcttcttcatcgtaagtctacgatctcctattcctttctaaattaaaaaatttaaaagactttattttcaataaggtcgagagctttgtacgcctaaaaaatggaggatttcgtgatgaaattctggcaacgactcttcacatcatttttacaaagatttcatttgatgcgttttttcggtcgtaatcgatcttttaaagagctacatcaatctagttatgctcaagaaattagcaaaaatttatctaaacgtttgcttaatgcatcaagggctcaaacgaatgatctattaaaacaattcgatactcatttgacggggcttacagaagagcaagcgcatacccaacaaatgacggtggggcttaatgaagttactcatgaaaagccattaacttggtggcaacacctttggtattgctaccgtaatccgttcaatattttacttagcctgttggcattgattgctttctttaccgatgatctaacgggttcaaccattattagtgtgatggtaattctttcaacactacttcgttactggcaagaagcaaagtcaaatcaagctgcggatgccttaaaggtaatggtgagtaatactgctactgtattgcgccatcaagtcagtgcagaagatttagaacttatgcatgagcgttatggcattgatactaaaaaccaaaccactcaccaatttgaaataccaattcagtatttagtgccgggtgatgtgattttattatctgcgggtgacatgattcctgcggattgtagaattttgtctgctaaagatttgtttgtctctcaagctgcaatgactggtgaatcaatgcctgtcgagaaatttccgttgcagaaaaatcttgaagaaaccagcgctttagagctagataatattgtattcatggggaccaatattgtttctggttcagctcaggcagtggttttaagtacgggtattcaaacatatttcggtgcattggctcatcgagttacggctactgatcggagcacgactgcatttcaaatgggtgtcaacaaagtaagttggttgctcattcgctttatgttggtgatggcacctgttgtacttttcattaatggcttcaccaaaggcgattgggccgaagcatttttattcgcattatctgtagctgtcggtcttactccagaaatgctaccgatgattgtgacttcaactttggcaaagggcgcggttttcttatctaaaaagaaagtgattgttaaacgtctagatgcgatacagaactttggtgccatggatgttctatgtaccgataaaactggaactctgactcaagacaaaatctttttatcccaacatattgatgttcaaggcgggaaatcagactttgtactcatgcaggcatttttaaatagttattatcaaacaggcctaaaaaatttgcttgatgtggctgttttagaagctgttgatgatcagatcaaaatacagaagttacgttacaagaagttagatgaagttccttttgattttgatcgccgccgtatgtcagtcgtggtacaaacgcctcaacaaaaagcccgtatgattaccaaaggcgcagttgaggaaatgttaaaggtttgccgttatgtcgaggtaaatggcaaagtagagcctttaacaaagcaatgtgaagtagcaattgaggcattaactcaacgctataaccgagatggtttaagagtggtggcagtagcgtatcgtgagtttaaaaatcatcaggaaaattattcagttgttgacgaaagtgatctgattttaataggttatattacttttcttgatccgcctaaagagtctgccaaagaagctgtacagagtttacatgcccatggtgtaacggtaaaagtgctgactggggataatgagtttgtcacccaaaaagtgtgccgagaaattagcctgaattatgatcaagttttattgggcggtgtaattgaaaccttaactgatcaacaactcaaaagagcagtagagcaataccacatttttgcgaaattaagtccggttcacaaagaacgtattgttgagcagttaaaagcaaatggtcacgtggttggtttcttaggagacggtattaacgatgccgctgctatacgtgctgccgatattggtatttcagtagataccgcagtagatatcgctaaagagtctgcagatttaatcttgcttgaaaaaagcctgatggttcttgaaaaaggtgtgattgaaggccgtagaacttttgccaatatgctgaaatatatcaaaatgacagcgagttcaaattttggtaacgttttttcggtacttattgcgagtgcttttattccatttttaccaatgctgcctattcacttactcattcaaaacttactttatgatgtttcacaaattgtgattccttttgacaatgtggatgaagagttaattgcaaaaccacagcgttggcaacctgaagaagttggccgctttatggtggtgtttggaccgattagctccatttttgacatgattacttttgggttaatgtggtttgtattttcagcaaatactcctgaacatcagacgctattccaatcaggctggtttatggtgggtttacttacccagacattaattgtccatatgatccgtacagctcaaattccatttattcagagtcgtgccgcgactccattattaataatgacagcggtgattatgtgtatcgggattttcttaccaatgggtcctttagcaagctatttaaaactacaagctttacctttaagttatttcttatatttacctgtaattttaggtgcttatatgtgtgttactcaatgggtaaagaaaatctatatccgccgttatggctggcaataaaacaataggtgcaaaatgaaattgcaatttctacaacatacagacttatcaaatattattgatactttaattagtctctcggctgcttttattttaggggcgttaattgggttcgaacgtcagtataggcaacgtacagctggtcttcgaacaaatgttctagttgcggtaggtgcagcaatttttgtagatattgcaattaatcttactggagcagatggagctgttcgggtaattgcctatgttgtttcgggtattggttttttgggtgcgggtgtcattatgcgccaagaaggcaacatccacggtttaaataccgcagcgactttatggtgttctgcggcagtaggtgctgccgcaggtgctgatttaattattgaagcaatattggcgacagcctttattttatctgccaatacactattaagaccgattgtccatatcattgaccgtcgtccgttagacgatgacacagaagttttacatgtaatttacattatatgtgaccgaagtcagagcaaggtcgttatggatgaattaaacctaaccttaaagcatcataattatcctgctaaagatattgatgtcacaccttttggagaaaaagaggttgagatagaagtaacgctaattgcaacttcaattgaagcagaagaagcacaacacatcattaatcacttaaatgcaatgccgcaaatacggcaagcattttgggataaaaacacaattaattaatttaacgagagtttgcgcttaattttttatgaatttctctaaatgatgaagcgcaaactctttcgtttaagccttattttttagctttaaatttaaggactataaatacaacaataccgacaatcagtccccagaaagctgaaccaacaccgaaaaattggatacctgatgcactacataaaaaagtaaataatgccgcttcgcggtcttcaactggaccaaacgctagtgcaatgttatggctaatggtaccaagtaaggcaatgcctgctaacgctacaataaaaatatgaggaaaagacatcagcaagcttgtgagggttgcagcaaatagccccatcaacacataaaaaaagccacagcttatacccgcaatataacgtttgcttggatcaggatgaacttggtcatctaagcttacggcagcacttatcgcagcaatattaacgctgtaacatccaaaaggtgcgagcacaacttgagttaaaccagtccaaccaatcagttgattaacatgtggtttatagccataactcttgatcatggctataccaggtaaatattgcgacaccatgctaatcacaaaaagtggtaatgctaagcctaaaagtgctgaccagctaaattcaggactaatccaaacgggtttagccaaggaccactcaagagtaggcatatgaaagtttaaaaagacagggcagagggcaatacctgccaaggcggtaaatacaatgctgtaacgcggccataatctttttgtaatgacataaatagcgagtaaagataaaacaaatatccaatcattttgcaagctcgcgaaaagcgaaatcccaaacttaagcaaaactccggcaagcatggcactggttaagctttgtggtatataggaaagcgctttttggaatatacctgaaaagcctaaaatcgcagtaagtaaaccacctactaaaaaagcgccaattgcttcatttaaactatagccactacctgttgccataattaaagcgaggcccgcagttgaccaagctgttgctacgggatatttaaatttccgagaaaggatgagtcctgataaaccaatacctaagcctaaagcccaaaaccatgaggtgatttgttcagatgacgcacctaaagcttgagcagcctgaatcactaaaatagctgaaacactaataccaataagaaaggtaataaaaccagcaaatacggctggtattgagaaatcttgaagaatcttttgcatagctaaatgttctaagtccctgaaaaattaatatgtttctgcctatgttttcagctaggtaaatctaacaattttttttaagaaggtgctttctatttttgactttaaaatgaaagaatattttttaaatagccattaatgatattatttatttcataacaaacggtgaatttgggatattgttttatggatgagcaggctgaaaatttaacacctcttgaattgaaaattatgcgctgtttacaagagaatggacgtttaagtaatgctgaactggcaaaacttgttggcattagtacttcgtcatgttggaaccatactcagcgtctttttaagattggggccatcttggatgtgcgtgctcgaattaatccgggtatggtgcaacgtgagactattgttttggtcggagtagtgctggatcgctcgacacctgatagctttcaggcatttgaacaagcagcaggtgatttggagaatgttctagaatgttacttggttgctggagaagtcgattactttctaaaaattcgtgttaaagatttggctgcttttaaccgttttcatagtgaaaaaattattgccttacctggggtaagacaggtaagaacattttttgtgctcaatgaagttaaaacagatggcatgctggcattttaacaacctaatagattctgacttccttgactcggcagcttacattgttgaagttgccagctttaaaccaaatccgaaaaataaaatgccaactaagaaaattccgcttgctgcaattttatggttttgtttgaaaaaagttgaaagtttaattccagagaaaataagcgcagttaaataactaaagctaataatttgtaaaatcaccgctaaaattaaaaagcttaaagctggataggcataatccggttcaacgaactgcacaaagaaagacaggaaaaataaaatcgctttagggttgagtaaactaatacttaaggctgttttataagggtgaactttatctaaagcaggtaaatcagccatttctgcttggggttgattacgtaatttccagcgctgaatgctgccttgtaaaagcttaaaacctaaataagacaagtaaagtgcgccgacgagtttgagtacgataaaaacccaagggaatgcttttagtaaagaagccgcaccaagtacagtacagagcattaaaattaagtcaccagtaaaaataccaagtgcacccatatatccggttttaataccatagcgtgaagcaatagacatcacataaagagaattgggccctggcaataacacaattaggaatgtaccaataatatatgttgttaagtctgttatgccgaacacgataaacccaataaaaaaccgatttttgtcatgataacaaaaatcggtaattttgtatgaaaagtgcagtttttaagatttaatttctgcatcaattccaaaagattgacgtaataaaagacttaattgatctcgcgctttaataaagccatcaacaccaccttgtaaaagttggaatgccattaagtcatggttaagttcatctttaaaactttgctcatcttgagctggtctaacaatcgcttctgcctgttttgctttgtttgcatcaagtgctgcatcgactgtacgcgtatcttgttcaagctgcgttagcaagcttggagagatcgtaagcaaatcacatcctgcaaggccaagcacctggtcgatgctacggaagctcgcacccatgacttgagttggaatattttgctgcttgtaataagtgtagattttcttaactgaaaccacacctggatctttctcgattgggtaagaatctacaccttcagcttttttgtaccagtctaaaatacggcctacaaaaggtgagattaaagtaactttggcatctgcacacgcttgggcttgatgtaaaccgaaaaggagagtgaggttacaagcaataccttcagcttctaacactttagccgcttgaataccttcccaagtcgatgcaattttaatcagaatacgtgactgatcaatcccataacctttataaagctcacataattcatgtgctttttgaatggtcgcttcggtgtcatatgaaagtgcagcatcgacttctgtagaaacacggccttcaatgagttttaaaatttctacaccaaattttacggttaaaatatcaatggttctttcaatcagttcatcatttttatagccttcttctttggcttgataataagcatcttcaatgagctctttactttctggttgctctgctgcagcggtaattaacgaaggattcgtcgtagcatctaagggacgaaatttacgaattgcttcaaggtcgctactgtcagcaacaacggtcgttaatgtttttaattggtcaagtgctgtatgagtcattgatattcaacatcttcaataaaaaatcttatgttttctttatagcacaaactctatccatactgtcgatatatcaattgttatgtttcaaagaaaaacgtttaggttctgcatctaaattgaaatgattttagggagtcggttgcattcgcttattacgaatatagtcaatcaaaaaccgtgcagcagcaccgagttcactttcgcggctccagaccaaatcaacgtaatattcaaatcgaggtgtaaaatcaaatacatctaatgctttaagtttattgtttaactcaggattttctttaaacatctcttgcggaagtacgccccaacctaaattacgtaaaatcattaagcaagcagagtggtggttgtctgtacgccagtaatgttttgaaaataataattcgggttttaatgtttcatctcgacttgccaccacaatttgtcttgtacctaaaatctgctcatatgaaacatgctcttggcttgcgagcggatgggtttttgaaataacaggaattaaggcttcacgtttgagttcaacaaactgttctctattgtctaaatgctcacgttcaaacataagggccagttgggcagatccatctaacaacatttgaagcgcatcttcttgaggggcagacacaatattaatttgtagatcgggaaagcgactttctagcaggcaaacatagtcggtccaattggtatgtagcagctcagacaccacaacaatagtaagattaggttccagcccagtacttaatgcatgcgcgtgctgtttccattgattcatttcaatcaatagttgcgccgttttttcatatagcactcttgcttcggctgttggggtaggttcacggcctttacgctcaaataaagtcaggttcaaatcgatttctaaattagcaatcgacatactcacagcagaggggactttaccgagtttccttgctgctgctgaaaatgaacctgtttccataacggcttggaacatgagtagttgttcttgattaatattcatctgtcaaaaaaaatgaaagaacctgattggattaatcaaaattataaaaataaaatgcacattatccaagttattattgagtatttaaaaatgttgatttccaagagaagactcattcatgcaatcagttatgaaggaattttgttggtcatcattgcgattgcattaagttttatttttgacatgccgatggaagtgaccggaacacttggtgtgtttatggcagtggtttcagttttctggaatatgatttttaaccactatttcgaaaaagtagaacataaatttaattgggaaagaacgatctctgtgcggattttacatgcgattggttttgagggtggtttgctgattgcgactgttccaatgattgcatatatgatgcagatgacagtgattgatgcatttattttagatataggtttgaccttatgtattttggtttatacctttattttccagtggtgctatgaccatattgaagataagtttttcccaaatgctaaagcagcatcacttcattaattcacatagattgaaatgaaataagcacccagatgggtgcttattttttggtcgataaatagaaattatttttctacaatcgcaaccacaccttcaccgcctgctgtacagatcgagattaatgcgcggcctgaacctttttcattaattaatttagctgcagtagccaagatacgaccaccagttgcagcaaatgggtgacctgcacctaaagatgaaccatttacgttcagtttagagcggtcaattgaacccaatggtgcatctaagccaagacgttctttacagaatttttcatcttcccaagcttttaaggtagagagtacttgagatgcaaatgcttcatggatttcgtagaaatcgaagtcttgaagcttaaggttagcacgcttaagcatacgaggtactgcataagcaggagccatcaataagccttctttaggcccgctcttaccaatgaagtcaacagctgctgtttcagagaaagaaagataagctaaaacttcatgtccgttttcttttgcccattcttcagaagcaagcaataccacagaagcaccatcagtcaacggagttgagttacccgctgtcattgttgcagtttcgcctttaccgaaaactggttttaacttagcaagtttttcaactgtactgtcaggacgtaagttgttgtcacggttaagacctaagaatggagtcattaagtcatcaaaaaaaccacgctcataagcagcagcaagtttttgatggctgcttgcagctagctcgtcttgtgcttcacgagtgataccccattctaatgcagtgattgcttggtgctcacccattgaaaggccagtacgtggttcaccattgcttggtgcatcaagaagctttttaaaatcaatctttgttagagctttaagacggtctttacctgttttagcaacattaagctcaagtaaaactttacgtaaaccatcacctacagcaatcggtgcgtcagaagttgtatctacgccacctgcaatacctacgtcgatttgaccaagcgcaattttgttagcaacaacaaatgctgcttgtaaacctgtaccacatgcaatttggatgtcgtaagcaggagtttcaggagcaagatctgtgctcaatacaacttcacgagtcatgttgaagtcacggctatgttttaaaacagcgcccgcaacaacttcgccaatacgtttaccttgtaagttaaagcgctcaaccaaaccattcaatgctgctgtcagcatgtcagaattagacgctttaaagtaggcagtatttgaacgtgcaaatggaatacggttgccaccaaggattgcaacgcggcgaacagtgttttgactcatggttttatcctgttgaacagaagttttggtttttgttgcttttggtgctgcagctacatttgaagatgtagacggggttgctgaagcagcgctcttactacgagggctacgtgcaggtgcagtcgttgaacgagtacgtgtcgtttttggtgtattagttgctgctttaggagtagtgctgttatgcttagccgtgttagaagccgactttgatgtatttgacactttttcctgagcagaattctcgactgctggattttcttgagttgttttgctcataaggcttttccaagcataataacgatattcttgttagctaccttaacacaattcaaatagacctgtattgactagaatgacattgtagatagcattcaggtcaagacatccaaagatgaactcaagtatgatttggagtaactctaatgaacgactgctttcatattgtttctatccatctcataacataatgaagcctgtcgtagaaaattcatttctttgagagataataatcatgactgatcaataccaagcatttacgcaatctcctattggtaaattcgttgttaaaaatctgggtttaccttcgcctgttgtattagagcgttttgaaagtgctcagccagtagtgaaaggtgcagtattggttggcgcggcgccatcaagcgttttgtctggtgcgattgcacaagtacttagcaatattcatacagatagctatgtaggcaataatgttgcattacaacaagaagctgcaaaagttggtttaaatttacgtccattcaatgcaggcgataaagaatcaaaatttaaggctgttgtatttgatgcatctggtattcaaaactcagaacagttaaacgaactttataaattctttaatccgattgcacgtcaagttgcgacttctggtcgagtgattgttattggtacaacgcctgaaactgcgaaaactgtaaaacaagcgattgctcagcgtgcacttgaaggttttatcaaatctgtaggtaaagaatttaaaaagggtattactgctcaagttgtgtatgtagacgaaggtgctgctgcaaaccttgaatcaacattacgtttcttgctttctccacgttcagcttatgtatctggtcaagtgattcgtgtttctaaagcagatgtggttgatgttgattgggcaaaaccacttgctggaaaaactgcattagtaactggtgcaagccgtggtattggtgaggcaattgcacatgtattggctcgagacggcgcgcatgttatttgtttagacgtaccacaacaacaagctgaccttgaccgtgtagcagctgacattggcggttctacattggcaattgacattacagctgctgatgcgggcgaaaaaattaaagctgctgcggcaaaacaaggcggtttagatattattgttcataacgcaggtattacacgcgacaaaactttggcaaacatgaagccagagctttgggacttggtaattaacattaacttgtctgctgctgaacgcgtaaacgactacttgttagaaaacgatggtctaaatgcaaatggccgcattgtttgtgtatcatcaattagtggtattgctggtaaccttggtcaaaccaactatgctgcatctaaagcaggtgtaattggtctagtgaaatttactgcgcctattctaaaaaatggtattaccattaacgcagtagcacctggctttatcgagacccaaatgactgctgcgattccatttgcgattcgtgaagctggtcgccgtatgaactcaatgcaacaaggtggtttacctgttgatgtagcagaaacgattgcatggtttgcatcaactgcttctacaggtgtaaatggcaacgttgtacgcgtgtgcggtcaaagcttgttgggcgcttaagcacttttagctaaataggggtgcttgtgcatcccttttttattcaagaatttataaattataaaaggttaggtatgaatactcgtcattttagccagctaccaaaagcggcattggcttatccaaaagtagtgcaaggtttaatttttaaaaaacctaaaggcccaaaaatcttaccgcaagttgaatatgtggtagatactttagaaattgatcagaaccatctcaaagcttataacgaagtatgtggctttcaaaataatggctttgtaccagcaatttatttggctgtgctttctcaaagcttgcaaatgcacatgatgacagcagaagcctttccatttccaattttaggtttagtgcatatccgtaaccagattaaacagaccagaccgattggcgtaactgaaaaactcactctgtcatgtaaatttggggaactaaaaccacatgataaaggtgttcagtttgactttattaccacggcaaaagttggcaacgaagtggtgatggaaggcttaacaacttatttatctcgccaaaaagttgagaaaagagtaggtgagaaagccaaagaagaacaagcgccatcttatgttccaaaggcagagtggaatattttagaaaacacaggccgccgttatgcgaaagtgtctggtgattttaacttaattcacattcatgccattactgcaaaagcatttggttttaagcaagccattgcgcatggcatgtggagcaaagcaaaagctttagcgaaccttgagttgccaaatgcttatgaagcagatgtgtggtttaagctaccaatgttcttgccatcaaaagttgagtttttaactgcaaatgcagataaaaagacagatttcttgattcgtaatgccaaatcacaaaaaccgcatgttgcaggaactgtaaaagcattataaaaatagcagcagcctgaacagaggtttgggctgcttttgagcaaaataacaaaaaatgcaaggaacttcatgtgattaaagaaattttactggccgatacccataactatcacggtattttagatgaacgttttattgatttagctcaccagttcagccgtcttcaagatgctagaactggacaaggtggagctgcattagcggtttattttagaggccagaaagttgtagatatttatacaggtctcaaatcacaaactgaagcttggcaacccgatactttggcagtttgctattctacaggtaaaggcgtacttgcaaccttagcgcatattttagtaagtgaaggttttttagaatacgataaaccgattgcgacttattggcctgaatttgctcaaaatggtaaagagcaaatgactttacgtcatgtgctaagtcatcaaagtggtatgtttgatgttcgaaatattatcgaaagtgcgagggaaatgctcgactggtcacatatgttaaatgtgattgcagcgactaagcctagattccttgccggagagggcaatgcttatcaagctttaacatttggctggcttgtcggtggagtacttgaaaaagcaactggtcaatctttagatcagctcatgcaaaaatatctcgttgagcctttgcagttagacggtgcttattttggtacacctgcaagtgagctagaccgtgtagcacgtttaattattcaaccaaaacctgaaaaaccagcggctccccaagttgaaaaacctaaaaagcctcaagcacgcaagagttcactctctgaaaaaatgattacgtggactggacaagacccgcaagattttcaggatgccatgattccaaaaggaatgaagcattttagtttctttagtgatgaagggttacaagcagtcattccggcagcgaacgggacatttactgcaaatagccttgctaaaatttatgcgatgctagcaaatcaaggtgaatgggatggacagcaattgattcgcccagaaatatttaaagaacttagtactattcaaagttatgcacgtgatcgtgtcatgccaataccgatgaattggcgcttaggatatcaccgcattattactatgggtaaacgtgcaaaaaatggctttggacatattggttacaatggttcaggagcgtggtgtgatcctgagcgtgacctcagctttgcttatactcataacttccagattggttcaatcacaggcgattatcgtttgtgggggctgacccaagaagctttacgttgcacagaccaaattttaaaaggccgtaaaggctggttctaattttagtattttaaagctggtatttttaagcaatgccagctcaacatttataataattctaggcgaataattgcttcggtatgacgcttaaaatcttcttcaactaaaccttgtaaaccaagtttataaatcccttctaatccacacacaaaggcaatgagtcgccacgcaatatctgtggaattagacctatttttaaattcgccttctttttgaccgcattcaatcgattgcacaatagcttgatgccaactttgcatggcgaggttatacgctttttgtatttcaatatcttgttcaattaagagttcagcttcattccataaacgtaagtagggctgaagcctgtctatattttctgcacctaataagatgaagagtctttgaaattggctagttgtttggagagtttgttcaatttcatcaagctgttccatcagctttaaaaaagcttcagcttttaaatgagatgccgaagaaaaatgatgatggacttgtccggtagaggtttgtgcttctgttgcgattcgacgtaccgtcatggctgtaaaaccttcagccaaagcaatttgcatggcagcttgcagaatcatttctctgcgttgatcgcgattaagataggccatgtttcttacacctgactgaattcgacacaaactacattaaaatttaaagttggacaagtgtccaattgtgtatataataaccgcaatttgaacacatgtctaagttttggatatcgaagagcgttatgcaaaaaaaatggttaatcctcacaattatcgtcctcatttatttacctgttacgattgatgcaacggtgatgcatgttgcaacaccatctttaagtgcagcattgaatttaactgccaatcagcttttatggattattgatatttattcgctgattatggcgggtttgattttaccgatgggtgcactcggtgatcgtattggctttaaaaaattattatttattggaaccgcagtttttggtgttggttctttagctgcggctttttctccaactgcctatgccttaattgcttctcgtgctgtcttaggtctaggggcagctatgcttattcctgccactttatcaggtatccgtaatgcttttaccgaagaaaaacagagaaattttgcacttggtctttggtctacagtaggtggaggtggagcagcttttggtccactagttggtggttttgtattagagcatttccactggggagctgtattcctcattaatatcccgatcattttagtggttctagttatgatcgtgatgatcattcctaaacaacaagagaaaactgatcagccaattaacttagggcaagctttagttttggttgtagcaattttaagcctcatctattcaatcaaatcggctatgtataacttctcggtgctcacggttgtgatgtttgtggtgggtataagcacattaattcacttcattcgaagccaaaaaagagctacgacaccaatgattgatctggaattgtttaaacatcctgtgatttctaccagtattgttatggcagttgtgtccatgattgctttggttggctttgaattattactgtctcaagagttgcagtttgtacacgggttttctccattacaggcggcgatgtttattattccatttatgattgcaattagtttaggtggtccattagcaggtatttgtttaaataaatggggtttacgtagagtatcgagcctaggtattttagtgagcgcgctcagtttatgggggcttgctcagctcaacttttcaaccgaccactttttagcatggacgtgtatggtctttttgggctttagtattgagattgccttactggcctcaactgctgccattatgtcatctgtgccccctcaaaaggcgagtgcagcaggtgctattgagggaatggcctatgaacttggcgctggtttgggcgttgctatatttgggttaatgttgtcttggttttatagccgctcaattattttgccagccgagcttccgtcaaacttaattgaaaaagcgagtatctcgattggagaaaccatgcaattagcctctaatcttgaaaatcctttaggagggcaattagttgtagtggcgcagcaagcttttagctatgcacatagttgggtacttaccatctcagcgatctgtttcttccttttaactgtatttgtctggtttagttttccgaagaaagtaaattaatatttttcacagtatttaaagtttcggtagaaaactttttcttcgaaactttaaaattcactgatagtccagacaaatgatgtagttcgcagtttatctgtacggatatgagctttatacgttcacactcttttaaaaacaaagtatgcttatgcctgtaacaaggagcatacatgtatcaagtacttgctagaaaataccgtccacgtaatttcaatgagttagtgggacaaaaccatgtttctcgtgcattaagtagtgcattggaacgcggtcgtcttcaccatgcttatttatttacaggaacgcgtggtgtaggtaaaactacaattgcacgtattttagccaagtgtttgaactgtgaaacaggtgtgacttctacgccatgtgaagtttgtgccacttgtaaggcggtaaatgaaggccgttttattgacctaatcgaaatcgatgctgcttcaagaacaaaagtagaagatacgcgtgaacttttagacaacgttccttatgcaccaacgcaaggtcgttttaaagtttatctgattgatgaagtacatatgctctctacgcattcttttaatgcgttattaaaaacactagaagaaccaccagaacacgttaagtttttgtttgcaacgacagacccacaaaagctaccgattacggttatttcacgttgtttgcaatttactctaagacctttagctgtagatgaaattaccaagcacctcggtgctattcttgaaaaagaacagatcgctgctgaccaagatgcaatctggcaaattgctgaatctgctcaaggttcattacgtgatgcattatctttaactgaccaagcgattgcttatgggcagggtgctgtacatcatcaagatgttaaagaaatgcttggcttgattgaccgtacgatcatatatgatttgattttagcggttcatcaaaaccaacgtgaaaaagtgagccagttattactccaatttagatatcaagccttagatgtctcgttagtactggatcagctcatttcaacattgcatgagttggctttattacaatatttaccagagctcggcttaaagtatagtgaagaaattaatgccaaaattcttcagctttctaaactgatttctgctcaagatttgcagctttactaccaaatcgcatgtaaaggccgttcagacttgcagcttgccgtaacgcaagagcaaggttttgaaatgtgcgttttacgattattggcattccgtcctttagcaccaaatgaaattttagtttcagagcctgttcaacaaaatgggcaagcagaagtaggcctaaattcacaagctcaaacagcccaagtgattgctcctgtaagtgctgttcagcctgttgaagttattagccaacccgctatggttgaacctgaacctgaacctgaacctgaacctgaacctgaacctgaacctgaacctgaacctgaacctgaacctgaacctgaacctgaacctgaacctgaacctgaacctgaacctgatcaggacttaatggtatttgacccaaatcatcatgagttgattggacttgagtcagcagttgttcaagagactgttagtgttcttgaggaagatttcattccggtaccagaacaaaagttagtacaagttcaggctgaaacccaagtcaaacaaatcgaacctgaaccagcttctactgctgagcctataggtttatttgaagcatcgagtgctgaattttcacttgctcaagatacgtcagcttatgacttggtttctgaacctgttattgaacaacagtcattggtgcaagttgaaattgttgaaacagttgtggtggtaaaagagcctaacgcaacagataacagccagctgatgccacaagatattttaaagttgccatcacaaactttggaaggtgagtggacacttgaaaagtgggagttttggtttagaaatagccagctttctccagccgttcaagaacttgctcaacatggtgtgatgactggggaaattggtggcaacacggttttccatattcctcaagaatatgaaaatatgttgactcagctacaacaagccttaattgaagctttaaagcagcagtggccaaatacacaatttacggtcgagtatggtgcagtcaatactgctacaccgtatgttatgcaaagcgttcgtaaagaaaaagctttccatcgggctacagaactattacagcaacaacccgttattaaaagcctcatagagacttttgatggtgagctgcaaaatattcaattaaaaccttaagttcaattgagttttgatctggtgagaaacttgaaaaaatagaattttcatagttttcactggattgaaatattcaggtcacgccactgtcattgtacttttctatgttagccattttagattttaaatggactatatatcgtcatgaaaaggcaatgcacaggaacaacttcctttaaatattcttattttttattaatcggcgccattctgctgagtggctgtaacgactcggcaaatgataattcgaatacacccgacacaggtaaaaagcctgtcatgcgctgtgctccataaacttaaataataaaaagaatttgatcatgattacacgtcgtaaatttttaaattactctttaaatatgggctttggcgctgcagcgttagcggctttcccatcgagtattcaaaaagctctagcaattcctgcaaataataaaacgggcactattcaggatgttgaacatgtcatcatcttaatgcaggaaaaccgatcttttgaccattattttggtacgttaaagggcgttcgaggctttgctgaccgttttacaatccctctgccaaatggtcgccgtgtctgggaacagctgagaagtaatggtcaggttttaaccccatttcacttagatggaacagccaataatgcacagcgtgcagatggcacgcctcatacgtgggatgacagtcagttggcgtgggacaatggacgtatggcaaactggccaactcataaaaccgatatatctatgggctattttaaagaaaaagaaatcccatatcagtttgcacttgccaatgcctttacgatttgtgatgcctaccattgttctatgcacaccggaacagatgcgaaccgctcttttcatttaactggtaccaatggtgcaacaccgaccaagcgttcatttgtaaataatgaatgggactggattgatggtaacccagcaacggcagaccgtggttacacttggaaaacctatgccgaaagattagaagaagcagggataagctggatttgttatcagaatatgccagatgaatggggcgataatatgttgggtgcattccgttcttttagaaaggccaacattgcatccggttatcccgtttcaagcggtggagagccgaataaaccgtatgccgatacgggtcaaaaactaccgtataaagcctatgatgcggctactgataatgccaaaaatccactctataaaggcattgcaaatacgctaccgggcaataaaccagaagagtatctcgacgcttttaaaagagacattcgtgaagggaagttacctcaagtttcttggattaacgcgccatcgatatactgcgaacatccagacccttcaagtccggttcaaggagcttggtttattcaagaaattattgatgcattaactgctgtgccagaggtgtggagtaaaacggctctgctcatcaactttgatgaaaatgatggttactttgaccatatgccatcgccatcagcaccatctcgactcaaaaatggccagtacgcaggtaaatcgacactaagcaatgctgatatgcaagatgaatattttgatcatgctgcacctgaggggagccattcacagcctacacctgatggacgagtttatggtccgggtcctcgtgttcctttatatgtgatttctccatggagtcgtggcggttgggtcaactcacaagtgtttgaccatacttccgtgctcatgtttttagaaaaacgttttggtgtaaaagagccgaatatcagtccataccgccgtgcagtgtgtggtgatttaacaagtgcatttaactttaaaacaccaaatgcagatgttttaccgcagctgagtggtaaacaaacacgtctgcaggcagatgcgctaagggaaaaccaagaagctttgccagctgttcctgtacccacggatattaagttacccattcagcaaagtgggatccgtctatcacgggcgctaccttatgagttgcataccagtgcgcgttgtaaagcagatggtaaggtgcaattgattttttctaatacgggtaagcaggcagcggttttccatgtatatgacaagctcaatttagaccgtattccaaagcgttatattgtcgagccgaataaaactttagatgatgagtgggatgctttaaacgataacttaggccgttatgacctatgggtacttggtccaaatggctaccatcgtcattttaaaggggatgctcaacgtattatcgatagtggtgttaaacctgaaattcgagtgtgctatgacattgctaatggtgatgtttatgtcgaactcatgaatgagggaaccaaggatacaatattgacagtaaaaccttgtgcatatcgacaagatgcgccattgcaactgaccgtaaaagcgggacaagttgttaagcaacattggtcgttggctgatgttgggcattggtatgattttgaagttacgagcgagagtgatccgtattattaccgacgttttgctggccgagtcgaaacaggtgaggactcctttagtgatcctgcaatgatctaagttaggatgaggcaaaaagaggaacttattttctttttgcctcattttttataataaaaaattctctaaaacttcacggactgactcggatattggaacagtcttgcgtgtttcacggtcaacaaacacatgcacaaaatgtccttgagctgatgcttggtcttgaccttgtttaaagattgccaattcatagcgtaaagatgttgtaccaattttaccaatcgcaacacctacctgaataacttctggaaatgataactcttgaaaaaagctacaagctgagtcgacgactaaaccaattgattttgcttcatgaatatcaaaacctgttttctggatgagcaaagcattggctgccgtatcaaaatagctatagtaagtcacattattcacatgaccgtaaatatcgttatctgcccagcgagtttgaatatctaaaaagaacttaaattgatcacgagtttttaaaacgggtttagtcattaataaatcgcctgataaattgctaaagcagctgcttctgtcatgtcacgtggattattttgcagtaatcgagtttgcaacatggcatcttgagcaagtcttggtaagctagactcttcaatacccaaatcgctaagttttaaagtcaaaccactacggtctaagtgattttgcatatggtcaataaacagatcacataacccatcggtgctaccgttactatatgggtctagccattgcataagttctgcatagtattgtttggcataaggcgcattaaatttcagtacttcaacgagcaccaaagcattggtatgtccatgcgacaaatgaaaatgcccacccaatggataggctaaagcatgcacggcagcaacaggtgagtttgcaaatgcctgacccgcaagcattgagccgaacagcatgttctgacgtgcctctaaatcattaccgtttttaagaactttcggtaagttatggtttagcagctttaaagcgtgcttcgctaaaatatcggtataaatatttttcttatgtttagaggtatatgcctcaatggcatggaccatcgcatcaatacctgtagcagccgtaatatgggcaggtagattttgagtaaaagttgcatcaagaattgctgtatcggcatagagtaccggagagacaattcccatttttgtcgtttcacctgtagtcactattgatatgggcgtcacttccgagccagtaccggctgtagtgggaattaaaataagtggaagtcgggctgttttgacctgatttaccccatacatttcttgtaggttttgagtttggttgggatgtgcgagtaaggcaatcactttggctacatctaaagaacttccgcctccaaagccgacaataacatctacattttgctgtttagcataattcgctgcatctaataccacttgctctggtgggtcggcctgaacatcagcataaatgacatgttcaattttaagagtatctaaaatttgaagaataggcaggtgtaactgatttttaatcatacccgcatcagttaccagtaataactttcggtaagtttttgatgccaacacattctgtaattcttgtatagaaccgagtcctgaaataatgttgggaacggtctgaaactgaaaatggctcatatacattatttccttatttttgaaaattattatagatgcattctataggattcattctgcaaattctcttaaaagtagctgtgcttttaagctgcatttagttaaagaaaattcacttgaaaattggcattttataaactaattttcaaaatcattaaatgaaattagattgtgaataccttattggtaaatgcaaataaggtaaatttttttaaggatatgcatgtgaaaatagatactgatgtcaatactggatacggcaaggataccgacaaaaatggatatgcaaatattaagtatcgtgagctaattcaaaaattaacagcaacattatcattgacgcttttgtcatttggatggggctctacagtaaacgcagcacaacaacaaatcgctttagtaggaacctggacatctatcccagatgcaccgcttgtgcaaaaaccagaaaaagccagtgaaggtctgtaccagctacaagttaatgctgacgggaccttaactcctgttaaggtattgcaaatgaaaagtccatcttgggttgtaaaatcgaaagatggccgttttgcatataccactaatgaagaaaatgaaggggcggtaacggcattatcggttcaaaacggaaaggtagaggtattgaacacggtaaatagtcatggcgggcatccaacacatgcatccatcagtttagatggtaaattcctatttgtgtcgaattattctgcatttgataaaggacgtggcggtgtcgctgttttgccaattttaccaaatggacatttgggtgaaatggtacaaaatattgtttttgcggagggttctggtcatgttaaagggcgtcaggatagtggccatgcccattcgacaacttttagcccagatggtaagtatttatatgcaagtgatcttggaaatgacaaagtctatgcttttcgttacaacccaagtaagcctcaaccacttgaagcggataagagccgagatgtgagttttaagcatggttctggtccacgtcatatggtcttttcaccaaatggtaaacaggcatacattaccgcggaaatgcgaagtgaaattgtgacgtttaacgtacaagatggccatttgaaaaaagtcgctgagctaaaactagttcacgaagacaaaacacctgaattcaagagtgcaagtggaattattcttagtccaaatggtaagtatgtgatcgctgcaaatcgtggtgcggacaacaaacttttggtatttaaaatccaacagaatgggctgttaggtcaaccgcaagtttataaggccaatggaattgaaccacgtgctttttcatttgatgagtcaggtaaatatctgtatgtgacgaatgtttatagtaataacattagcttattccgttttgataccaaaaatggctcattaaaacctttaggcgatgcagctaaaatatcgactccaactgatatcaaattcttttaataattttttctcacactgatcctgcaatatttataagctattagatttttcagtgttcattgctacagatactcaatcttgaaagacaatcaagattgagttgaggattgagtacatagaaaattcctttaaaatctctcattttacttttcaagccgcgtgagttttgagaaaatgagagcttgtcacaatggtcaattcaaacctgataataatgaataattttgtcgggtttttgcagatttttgcgtgtaaaatacttatttattttttagtttaagtggttggaataaatttctaatggaagcacagtataaggtgttatgtgtctgtttaggaaatatttgccgttctcccacggctgaagtggtttttagacattattgtgatcagcatcaactcaatatcattgtcgattcagctggaacaagtaactatcatccaaataaagcacctgatcagcgtagccaattgcatgcaaaaaaaagaggctatgacttatcttctttgcgggcaagacaactttcaactcaagactttttagattttgatttgattttggcaatggatcatcaaaactttgatgatatccacgacttgctacaaagagctatcttccaatttggcagtcatcaaattcgagcaaaagtggcattaatgagtgaacatgatcctcaatatccacaacaagctctgcctgacccttactatggtggagatgagggctttgaacgtgtactcgaccaatgtgaatcaagtgcgttggcgtggattaatatcctaaaaaaacaattgaatgtttaaaaacaggtttttcaatacaatgcaaattcaaaatcaagtacagcttaagccattcaatactttaagtttagatgttacagcttctcattacactaaggtcaaatctattgaagatattgaagaagctttagcttttgctaaagagcatgagctaaatgtacttgtattatctggcggtagtaacatgctattaccgcaacaaattaatgctttagttattcatcttgatattcagggtatagacgttttatctgaagatcaggattttattcgagttaaagtcggtgcagggcaggtttggcacgatttcgttttatatagtacaaagcaaaattggtttggcttgcagaacttggcacttattccgggcttggttggtgcttcaccagtgcaaaatattggtgcttatggtgttgaggttggtgagtttattgagtcggtacaagtctatgaccgtctattaaaacaaaccggatcaatttcggcagcagattgtcatttttcttatcgacatagcatttttaaagatgacccagctcgttacatcattactcatgtcacctttaagctgcttaaacaagccaatctaaagctaaattacggtgatttaaaacaggcagtaggagataacctgactgctgaaaatttacaaaatcaggtcattcatattcgtcaaagtaaattacctgatccaaaagaatatccgaatgtaggaagtttctttaaaaatccgattgtaaatactcaagaatttgaacgattaatcgcacaattctcaacaattccacattatcctcaagcgaatggtaacgttaaaattgctgctggttggttaattgatcaggctggatggaaaggtaaacagcttggtgtagtgggaatgttccataagcaagccttggttttggtgaattatgccaatgcatctcttgcggatgtaaagaaaacttatcaagctgtacaacatgatgttgaacagcgtttccaaattatgttagaaccagagcctgtgctttataacaatttaggtttaattgaaaatcatacggaatagttttatgccaaaagtacacttgatggtacgttttgtacaagtagttactgtactatttgtactattaggctgtttcgtgatttttttatattcgccgttttattcaaaacttattgtagctggacttaactattttgttccggtagatgttaatgaagtggctgcggaaagccagcgaaaagcagcattaagtgaacatgacaacttagaaccggggtcaaatttatggattgctcgtcaggcttatttgaagttaacagaagatgctttacgtgaaaataagactgcagatttgggttacatacaagaaaactataaagctttgcagcaaattattcttttagaagaaaaagaacaagaactacaggaagagaaagaaacgacagctgtgagtgttcctttggttgcgaaaaactctgaaattgatgcggccgatgaagcaagtagccctatcgatgcagcactttctattaatagttctgaaaataaagcccttacagagcaatatacggagtttttagcaagaaaacctgtagtgccagagcatcaaaaagcggcgagtgagcctgagcagaaagttgaatatgttcgtaaaaaccctctgcctgctcaacctaaaaagttatcagaaccttatgcgattgtagtattgggcggtggtttaactttagataaaaatggcaaagatattgtagttaacagctatacgcggttaagactagaaaaaaccttagaagttgaaaagaaaaaccatctacctatcgtactaagtggagttgaagctccttatatgcaagcatggttgaaagcacgtggagtagatgcaaaattattagaaaagcgcagtatgaatacctgtgagaatactcgctttagttcattgttacttcaaaagaaaggtggtgcgcctacagttatgttggtcacagatgaatatcatatgccacgtacgcgccgtttatttgctttaaatgggatagaaactattcctgttactgctccaatgccaaccccgcttacacgttggcaaccgagtacacaaaactacgatcatagtcgtcgtgcaaattatgaattacttgcgacaattcgtgacatgttatttggttcaagtgattgtcgagaggtgccttaatgtctgagattccatttctcaatcctgccgtattaaaacaattagatttaccggttccgaaccgtgaactcactccgcaagttttaagcccactcaatttaaataccttagaagaaccttctcgtgagcttttagcataccgtaaattatacggtttacatttactggactgtgagcattggcaaggctatgtccaaatgcctttatttcgtctgcatgtccaagtttttaaacctaaattagacaaaatccaaggaaccgtatgtttattgcatggttatctggagcatagcggaatttatcagcccattattcgcgaaatacttgaacaaggctttagtgttattacctacgacttacctggtcatggtttgagtaatggttcacctgcaagtattcaaaattttgaccattatcaacaagttctgatggcggtttatcaatatgtcaaacatgctgatcaattaccgaaaccatgggtaggtattggtcaaagtacgggtggggcaatctggatgcatcacttgcttgagtatgcagaaaaaagacaagacccaatcgtcgatagggttttattgctttcaccattaattcgacctgctaaaacagcatggtggcataatccggtaggtctaggcattattcgtcgtattaagcgtcaagtgcctcgacactttagacggaataaccataatcctgaatttttaagatttattcgtttaaaagatccattgcagccacgcatgatgggcatggattggattttggcaatgtcaaaatggatgcaggaaatggaagagcgacctgcttgtcgtattcctgtctggcttgcacaaggggcattagatcaaacagtagactggcgttacaacatcgagtttattcgccgtaagtttaggcttcaaacattattgatgctagaagagggttctcatcaattaattaacgaacgtgcagatattcgtgcggctttaacaggtttaattccagcctttttgcatgcaaagccgaaacatttttattattaaagtttgaagctgcctctataggcagctccagttttaactatttaaaaatgattggcgtcagccatattccacatacgataatagaaattatcatcatcatttttcagttcagattgtaaaagctcaccttcttttaagaagaagtgtaattgagcatagtttttaatttcacggtcattaatccgttgagctaaatgatgagctttaatatccgatggatgacgtaaacctgccgcagcaatcatttctgataatgcatgtaatgtatttttgtggaaattaaatacacgttctgctttggtcggtacatggagtgctttctggcgatctttatcttgggttgcaacgcctacaggacattggtttgtatggcaactttgcgcttgaatacatccaactgcaaacataaagccacgtgctgagttcacccaatctgcaccgagagcaaatgtgctggcaatatcaaatgcactaataattttaccgcttgcaccaattttaacttgatctcttaggccagcacctacaagtgtgttatgaacaaaacgtaggccttcacgtaatggtgttccgatatagtcactaaactcaataggggctgcgccagtgccaccttcagaaccatcaactacaataaaatcaggcacaatttttgtttcaagcattgcttttacaatactcataaattgccaaggttgaccaatacacagtttgaaacctaccggtttaccaccagataaagtccgtaacttctgtaagaaatgcatcatttcaattggtgtcgaaaagcttgaatgcttcgcaggagagatacaatcatggtcacgggaaacaccacggatctcggcaatttcagcagtaatcttatgtttaggtaaaataccgccatggcccggtttagccccttgcgaaagcttaagctcaatcattttgatttgtggcaattgagactgcttagcaaacttctgttcatcaaattttccgtctaaagttcggcagccaaaatatccactggcaatttgccaaacaatatcaccaccattttctaaatgataagggctgagactaccttcaccggtatcgtgataaaaaccgcctaattgtgctcctttgtttaatgcacgtattgcattcgcacttaaactaccaaagctcatggcagagatattcataatggatgcactataaggttgaaggcattgggtattaccaatttgaatacggaaactcttaggatccgctggtggacatggactaatggaatgaacaataaagcgataatcttcttgatagacatcaataattgatccaaaaggtttatctgcattctcatttttagcacgttgataaaccaaacttctttgcatacgcgagaaaggaagggcatcttgatccgcttcaataaagtattggcgaatttcagggcgtatatcttcaaataaaaaacggaaatggcccataatcgggtaatttcttaagattgaatgtctattttgtaagacatcatatagacctaataagcttaatgcgccactgacgacccataaaccgttgagtaaagtatccgaaataaaataataaatactatgaggtgtatatacggttctaaaccacgtgattgtgagtacagtaaaaatacacaagaaccaaatagagtggcgtgaaaagaatgtattgagaaatttatgtcgaatgatttgtgccggactcgccatatgtgaacaaattcctaatgttttactggcacataccttgccaagaagcagccaaaactacaagtagggaattgtttaaccagtattttattcatttaatcttttaccaactgatcatctccctaatacgagaagctgatgagttggcaaagaccagagctttattaagctttaagagggagctgtttttttatgagcaaaataaataaggtgatgactaagctaaatccaaaaataggtaaactcagccctagaatagcaagcattaatgtcgtaattattctttgttgtgtagttgcatgtttccatacgaacaaagtttggttaataaaatgatgggtcgtaagctttacattggaggttttaaaccaagctttatacgcataaacaatcattatacatagcccgagcgcatacagaaccagaattaattgattgacccaaccgaatagtaccccaatatgtgcatcaactccccagcgtgtaagttttgcaactaatgaataatctttaaaagcgagtttatcgattaccttgtgttcatgcatatcaatcgcaatactatctgcttgtgtgggccatttgcgctgtatttccgcaacagtccaagcttggttcgcagcaactggcggtttgatttgtatttctgttgaattaatcccatttgctcgagcaattgctaatacagaatcgaattcagctggcatgatgtctaaatttggcgtttccatgatcatttcgtgatgttcatgatgagccatttctggcaatgaaatctgatttagtgaggtggtcaatattggtgtttgccagtttaaccattgacgggcaatacgaatattatcaccagcccattgagaccatgtaagaccagtaatcgcaatgaagaataaaagtggtagtaaagctaacccaatagaactatgccattttaataagtgatttttatttgtttgtctgtttttgaagtttgagcgacgcttccaccaactgtatagcccacttaaagttaaaaaaccaagccaacttgcagcaagttcactataaaaacgtccccattttcctaataataaattgctgtgtaattgatctaagaatgtacgtaacggtaatacgccactggttccatacacagcaagttgtccttttacagaaagcgtataaggatcaataaaaatggcttcattatttagatggtgtgtatgatcggaaaaaataacccgcgtagtttgcacagggcttggtgatggtctgacttctgtaatttttgcagttgcaggcatgacttttcttgcgctttcaatctgctggcttagaggatatatctgatttaaaggctgaacatttaatacatctttatagatgaattgctctaactgaggcgtaattgcatatagtaagccagtaaatgcggcaacaaatataaatggggcaataaaaataccggcataaatatgtatgagacggaagagactacgccaaaagctagaagtaggggacattttaaagtgatatcgagcaaactttgtcgtgaagtatatctactttaaattgtattttgaaattgcacttttcattggttagcttgattgtagattttctaaagtatcattgtgctgaattactagcaatgctgttgcttggtgttatgaaatatttcgtaaattttgctctctaaatacacagctcatatgatcaatacaatatttagtatagatatttatgaaaaagcactttatagaaaaatttttattgttaagtttgttttaaatattattcttttaatttatctagagaaactaaattatctatgatttatttgttagtattataattccgtaatttattctagtaccaatagatttatgatgttggtttgaatgagtacagctaatgagtaagaactcttttagagatattaagagtgtatgtataagctttttaataaaattttatattgttactaattctattggttaatattttaagaaaaattatcttattaatttttataatatttagtgcttaataaaatttttaaatgaaacttctagactaaaaaacaaaagtatactcacttgctttttagtctagtatttcaatattattaaattaaatagcgactaattcctcaattttctcaagatcgattatttttttaatataagaccaagttttttcagcattaattaaatttttatcaattgttccatcattaataaccccatcgaggatattaagaaatagattggttaatgcagcggcgtcctctacctgaattttaattaagatagaaaaaacaagctcatagagccattctctatattcattaataggatttttaacggatgggtaaagttgtactacttccatagttgcctttttaaataagcatccattaaattcttctgtgtaaatccagtcaatataccaattaaataagcttctgagttgaactaaaggtaggtcattggtattgattctttctaatatagcagactgtatatcagaattccttttgtaaaggcatgattctattagcttttcctttgaaggaaaatacttgtagaatgtcatctttgcaacattagattcagcaataattctgtccactccaatagagttatagcttttttcattaaaaagggcagttgctgtttttataatagtgtctctttttgacatcgatttccccgtagtaaatcttttgaaatccgtttcttttttaaggctagtgctctggcaaaagtcagtttaatcatattgaaaacgctaatgtaatacaacatgtgagagcctaaaaaaatagtatttttcgatattaattgttatgtgattcattaaaaaaattcattaaattatccattgatttgtagtaataataaacctaatatcaaattgtttagggatgagtatacaattttatttagtagcaaatgaatgcacgattaaaataatggggaactcataacctaactataagaattaatttgttattgagaatgattatgtcaaaaaaatttgaagatttcgataatccaagacaaaaggcattactggggatgaagaatagtattcctacagaacagtgggaagaaaatctaaaatttctcaaacaattaagagcgagaattgctgaattaccagtatgtaaacatccggcgatcgaagttttaaataatggattgcttgataaattcactttaacaagaattcatttagaatatcgtcatgcgattgttcagatctttactgatgccttattaatggcccagttccagacaaaacaattggagcctaaactccattctggagctaaaatgtttccacgtgttttattaagtttaaatgtacttgatgaatttggttttagacccggaacagacctggacaattattatctaggtaatccggagtatgcacattatcctttatatgaagatttattgaatgattatggtttgagtgagaaggaccgtagagggtatcaaccttcaaaaattgcagatcaggtaagaaattttctagaatcatcttatgatagttatattaaagtagttgctttacttgcagtggccgaagaagaagtgattctttttagcccaccacttcgtgaagcgactaaggctattggtgtagatgttgaaggtggcggctattaccatgttcatggggtatctactgacgaaacctcagaagcagcagatgatgatcatgaagatgatctctggtttgcgttagcgcaagcaataactaaagaagactatgagagcttaacaacgctttgtatggattattgtgctttatggaatgagttttgggatgcacaaattgctgatattcactacttagaagcaaagaagttagcataacttgtatccatagtaagacgaataattgataaaaactaaaaagcctattcatatatatgaataggcttttttaatactttaaatccagcccatctataaactaataacctgaagtatttcatttaatacattatttgcatctgtgggaaatgatagaattacgaaagtcagtaagttgatatgtatggggcttaaaaacatgcatcctataagtgtgagcaaatgaatacattcatatacagctatctgaaatttttaacctattgaaagtacaaaggtttaagtcttgttccaaccatttacaatccaaaccagattaggcggattctacttcctttataatatacctgtggtttttgtatttttattaaagtaaattaaaacaagaacttataaccataaaatgacgtattttattgttaactaaaaacgcttgtagactatttgtagactgttgagaaacatggttaaatcaaagttcgctaaaacaggtttaagacatgaaactcaacaaatctactgttgatgctattccattaactgaaaaaggtcaaaaaatatatagagatgcagaactgatcggttttgctgttcgggtaactaataaaagtaaaacctatattgttgaaaggaggcatgaaggtgaactctatcgagtgacaattggcaaaactaccgatattcctgcaacaaatgctcgagcaaaagctcagatgattctggcgaaaatttcaaacaatgaatatgaaaagcctatcaaattaaagaaggttgctaatcctttagatattaccgtgaatgaagctcttcaaatttatattgatagaaatgactttagaccaaaaacaattaggcagtaccgtaagtattttgatttatatttggggtggggcaacaaaaagcttttccagatatctaagcaagaagtactggatcgatttattgaggtatcagaagtaagtgagtcgtcagcaaatggtgctgtatctcttttaggtaccttatggaagtatattcatgttctttattcaacagatgagaacccgattcttaaaagtaatccagttgacattatttccgtaacaagaggttggaataaaatagaaagtagggatagacatctccataaagacatcattcacaaatattacaatgcagtgcttcattatgaagatgagttaaatctggaaaatactgctaggtctaacacgcatcgggatattgtattgatgtgcatgtatacgggatgccgtaaacaggaggcatgttgtttaaagtggtctgatgtagatattaaaaatggtaccttaacttttagagataccaaaaatggttcagatcatacttttcctattggtgatcatctacacagtattttgcgtgaacgttggttattaagagaaaacgattgggttttcccagctactaagatgcctacttcgtggaatatgcatgcaactaaggtagatacattattgaatagagtgggtaaggaagttgactattacgtttcaatgcatgatttccgtcgtacatttgccactatatgcaaccttttaagatttaatatttatgtgacaaaaagacttcttaatcacacggctaaaccaagaattgatgtgacaggtggttatgttcaaattccagatgaggaattaagagcttcaatgaacatgattgaagcggtgtatcaaggtaagattgattgctttaattaccaatctgtatgggcagaaagattaaaagaaataaaggcggtctaaccgccttaaactgttgcaagctgtgctgtattaagcacagtcttgctttgctcatacttcaaaacgtccttctttttatatgaaacacgtcttccaattttcgagaaaggcagtgatgattgatcacaacgcattctagctaatgtccaaggcgagcaatctaaataaagtgccacaacctcttgagggaacttctgttcttcattagccattatgaagcgatccaaatattcttgttgctctgcatcagatagatttctcagatcttttaacatttactcctccttactttccgctttaacttctaattgagtaccctcataggtgccgtcacccccgcaattcagacaatgtgtatacatgcctaaaccatccccatcaggacagaagttttcaggtaatgacccgtctagaaatacagtgccgccaattggctttgtgtgaatatgaggggcaaggccgtaataggggaaaatgcattcaccatttccatcatcacaaaaatcacatgttttaacttttacttcactcatccattagctcctcaactcattacgttctttcttcaattgacgcaaaaggttgtgaagagtaacggttacagctttatctagacttttggttgaatgaaactctgctagttgagacagtgctaaaccaaaaatgtgatatgcaaaaacttttgcagcttccggattgtttttgagaagctcttcagtacttggacaaatgattttttcaaaaatatgaacagctacctgatccggagtaccttcaatactgctagggctcaaattaacttcaccaataactttgctcattgttgagaatcctcacttaaaatttcccattcaccccaatcgcccaaataaccagattttgaaatgcttgttgtaatcacttgaccatcatcacaagttactttcattcgattggcatctatgcgaacagctttataaacaacatccatttgtaaatttgctggtaaagggctggggccatttacagacttaattcttacttccatttttgagccctcaaatattcttctttagtccactcaacaaactctttataaagctgctgagcgggtttatttaaccggttgttgtagtctattgttatgcggcgccaagctactggtacggcataatgtttcgttaaaagcattgcttggtttaacccttgctggactattacaaagcccagcaagtgcaagtaattagtaaaaccaagtaagtgcttgttattcactttcttgaattggtctttcattctagtaaccgtccactaatagataatcaggatcagcttcaggttgggtaggtgtaggattctctaattcatagcggcgttttctcacataccccattagcttcggttgaatctgcgggtctcgtgcagccacgtctatttccaaagcatctagcgttgtaaggtctggtgcgttctggatctgaaccattaaagagggtggctcattcgcagatgcctgttctttttctagctcttcaagacgtttgtgagtggcgagaaggataggcttcatttgttcgtcatcccatttgcgggtataacgataaaccgcatttacttctgcaggtgtttttgactcttttacacgctgtagaagagtatctagggtttgctgatattctggatctactttaggctcgttagtttctggaactaatagatcctcggatgatgaaacataaggcccctcagtaacaacaattgcactatcgagatcctcttttaaatctttagtaggctcttcaattactgttttttcagtattaacctgaggtgatttctcaacttcattttctaaaggcttttcttcttcaacttcatcagttggcttgttcagaagtttgagcatatcttcagcaaactcaccaccactgactttaataatcgcgcagcaatgagcaaaagcattatcaaaacttgagtggacttggccatgctgaagcatgcgtaattgtccttttgaaccattccacttaaactgctgcacacctaattcaacagttggacttgggtaagagcaagtagaacctttagcaggcgcttcttttaatggttcaggtacctcaaattcgccaataaaaatagttctaggctttaattgaaattcgaatttatcaaaaacatcaaagccaaagtcataagggttaaatggctcccagccattacgctcagtattatttactaaaagtaattcaccgttggcccaagcaagtttagcttcaactttatttagtattttcatgctgtcatccccgttttagctaatgtttcaatgtcttgtttaactgctggtagttttgcctcttcaatttggataagggcatctatgccgaagtgttcacaaactgttttcacgtctaggccgcgttcagctatgaagttttgaagttcatctctttgttgatctgagataccgttaaattctggtggactaatccaagtgccacgttgcttatcaaacgtgcaattcaatgctttagctctcattaacattgtttggcgcatgttctggtaatacatgtgttctttatcaagcgactcagttaattgattaaggtcacctgcatgctcagcttcttcacagctttgtttccagttttctagctcttcttgggctttagctgctgcaagttgtgcaggcgttaaggtgttaatgtgatctttagcttgagtaatcaggtcagccaagaaagtagggtgtgctttaagatcaggcacccatacttcaccggtttcaccgcctaaagcacctgagtttttcgcatgatgtgtaggcgaaggtttgaaattaataacgcgggcatttttaccttcaccagtagtaacagttgttagataacccatgacatctgcaatacggtaaagctcgttacggtttttaccacctagatctggtcggtaaataatttgatcaccgttttgatcttctgatgcgtgtgcaatgaaaacaacatctttacctaaactgatcaaagtattgatgtattgcttaaaagtttggttcgctaaaccttgagcctttaactttaaagagccatctttttgacggttattagcagttagcaatagatgggttttaatgcattcaagcattgcacccacggtatcaatgactacggttttatatggtgctaagtcctgcggagtaaggtttgcaacatcactccattgttgaacctgtacaaccgcacctcgacgtaattcaccagtacggtgagcaccacggtcaaagtcaaaagaaattgctttttccgcagtaaagcccatcgatgatttacctaaacccggatccgcgtataggtacacaataattgcttgaaccaataaagtttggtcagcagtaataatcggtagagccattttattatccttatcttgagccagtgaagccgcgcttagttttataagctttgcggtcacgtgtagggatgtttgtttcacgtagctttattgcgagctgctttctgcgttggaagtcgatttcttgtgtgagttcattccaaacttttggatagtcagtttggaacttttcaacgtccaaaggtgtcttaactgagtccttcaccttgtaaagaactgagccattagcattagatgcgtacacttgccagccaatgcggacagagtagaggcccttatcatcacggcctaaaaatgacatatagccgtcagggtgttttttgaaattagtcatctttaagcctccaccaacttgttacgttcgatgaagccttttagaaggtcattgatgttgcggatgtcttcaaattcggtgaaatcgttatatgacttaccgttaatgtcagtgatttcattcacagtgagttgggtaatatcgacagcggtgaattcagaacccggaacgccgtagctgtctggatgagcttcaaaatcaaagctaacgtttaaacggaagctatctaatttaattacagcaacgccagaatgtttacctgttatttttgcggttaaaaccccgtaagtacttggttgcgtttttggagtaaatagagaaggagcttcttttgtttggaaagctggttgtagctgacaagcaactaaagaaccacctgagattgcaacagcagccatgctgacaaatgcaaatgagttgaatgagttaacttttacgttcataattgatctcgcagttttgcaaaagcacatcggacctggggaggggcggtgtgcttttttgttgtctacgagacaaatactactttaagtagaaattaagtcaatacatagtaggaattatttcctacttaaagttgtatattattagttttaaataataaaaaacccacaaaaagtgggtttaaagtaaaaaattaataattggtttcaaagaaaataagctgaaattcaataaatatctcggtacaagccaaccacttttccaacaaggcggcaatcttcggaaagtttaataattttatcaggccagtctgggttcaatggttccaagaatttacttgttccttcgccctcaatgataagccttttaaaagtcgcctctgaatcgccagcgcaagctacaattacaagatcatctgttttaagatcaaatgtttgaatgtctggattcacatatattctatcacccggtagaaaggttggagccatagaatatcctactacttttaaagcatatccatttttcccgcatcttttatttggcggtaaatattcttcaatttccgtatctttcaaaactgtctcaatcggtgtaaatgaaccagccgcaacccaagagattactggaaccctgcgtccttcgaaaccaactttatctgataaatcaatattattgtctaacttagtgccatggtctaagtaactaatttccactccaaaaatatcagccaatgtttgtagcttttcaattcttggtttagcagaaccgagtgtatatctacgagccatctcataagaaacaccaatagcattttttaactcattgatagttttaattggagagtcttttgccttcatcaatgcgttgagtcggtccgcaaagtctttgtatttagcgtcttccatcaaaataggcttcttttctactgtgggtagaattttactatcaatttttagttgcaccaattctatttttggtagtatatttctttctactttaagtaggttttttggtgtcatttatgactactccacatgaagcatttaataacgctgtgacttttgcagggagcatctcagctttagctcgaaaaataggggttacaccttgggctgctagcaaatggaatcctgagaaaattccagaagatcgctgtttgaaaattgaggaaattactcagggtcaagttaaggcagaacaattacgaccagatattaactgggaatatgttcgcaagaaccttaagaagcaaaaccaatccgtgagctaattctcacaaattagcaaacgtgcgtatacgtgaaatttaaagagggattcacatatgagtgaaatcaacttaagcccagaggctaaaacagcaatttacaagatgattcaccagtcacaaggagttacgccgcaagaaattgcaaacgtacttggtgactcttacaagagcgtacttaattacgcaaacccaaatatggaaagccatttaccaagtattaagaagcttgaggcaatgattcagtttacacgcaacccagctttagttaaggcatgggcacacatgcttggttatgttctagtgccagctaatcaagtggatgagaaaggccatgaagtcagcattgttgaaaccttgctacatataaatattaacaatggccaaaccaatcaacaggtccacaaagttttagaggatggagttgttacacctgcggaattagcagatacagaagaaatcttagaagaaatggaaaaccacattcgccaacttcgagaggcgcttaagtcggaagctgcaacttatatttctaaggtaaagaaagaaaaagcctgatctggtccatcaggctagttaattcaattacttgctagaggaatcgaatatgcaaaacaatttagcaaatcaatcggctaattacaacttaccagaatttctatctggtgacgttgttgtacttactgaagagtgccgcacttttaaatcaaatgatttgtttgaagttaaaaacaaaaacttgactagtttatggaccatcaaatcagagaatcatttgattttagtttcttcaaaagaaatccgcacagcaacagttgctgaacttaacgccaaacgccgactaacaagcgctgagcaagcattagcggaggtgtcatgaacagctttacacagcaaatcaaagattctcgccagcaaagtgaaatccaatctttctatgagcctgcattacgagtacttgggcacctatttgaggtgaaaaagcaaaatttacgtaacaaaggttatgacgaaaataatgcagcggtaacaaagattgaattttcagaggctatggctcgtcaatttcgcataacgcagtggttagcacagcagattgtaaccagcttaaccaaggcgtgtttggttgattcttttggaggctatgttaagccaaagggtggtgaaaagtgagatatgcagcaagaagaaaacaggatatttccgtttccaccacaccgctagaggtggtaattccactggagcaaccagtaaagatctatacggctaaagaattagcagccatgccactttcagtcatgaatgccgcaattgaggctcaggaaagattttatcaacttgaagaattaactcatatggggggggcaggctatagcagttcgccgtctcatggaggatgggcacaaactaattcaggtgaaagaaaagtctcgtactcgctacaaaatcaacaacgaatttattcctccaagaattattcgtcagttggaaatgcgcggtcttgtaaaattaggagcagtcactgatgtataaatatctccaccatatcagcgactttatggttgctacagcgcaccttagcccagttgaagagtgcttttatcgccgtgctctcgatttctattatttgaatgaaaaaccattacccaaagaaacccagtcggtttttcgtcggttacgtgcaaatacccaagaagaaagggatgcagtattaattgtgctgcaagagttttttgtggaagaggaagacgggtttcacaacaaacgttgtgattcagaaatcgccgcttatcaaaaagtaggggataaaaatcgtgaaaatggtaagaaaggtgggcgtccacgtaaggaaaaaccaaaagaaaaccaaagtgaaggcgactcggttaattctgaaaacccacaaaaacccagtgggttaattttgggttctgaaagtgaaagccaaaaaaaccttaaccataaaccgttaaccgataaccaatatatagatagtagtagtaatgcgcgtgaagaaaattcgcaatttacaccaatccaatttgctcagtatcagatcgatgatcacaagcgttactcaatgcgtgaattcatttctgaatacagcgagtttcaatacgatttcatctcacttgctcaacaaagatttgtttctgtacctgaaatcgacttgagaaccatgattcaaaatttcggtgactggtactttgcaaacgaatctagttcattgaatacaccaagcatctggttggttaagtggttctcttgggttcaaaacaacgagaaacaagttgctgctaaccgcaagaaacaagagcaaatcaattcagctggtcaaaaaccacaagagtcgggttacttcgctaatctttttgaagaacagagcgaatctcaaatcgtggatgtaaccccagcaaaaaagtttccaatgattgaggaggtaggtcatgcatgagattaccttgaacgaagtgcgtcaattaatcgcatctcttcgcactgtttacgctgctcagttcaataagcaatttccagcaacaggcgaaagcgcaattcctctgtcagtggttgagcaaatcgcacttaaaacactggttggcgttcaacaaaaccaatttaacaacgcacttgctcgattacttacagcaggtggacgttttatgccgtcatttgctgagtttcgcacctggtgtattggtgaaagttggatgtctccagaggaagcttggtcacgtgcatgtaagtttacgactgacagtaccgtggttattacacaaattacaaaatatgcattagacgaagtgatgtatttgatcgaagccggccaaatgcgagcagctcaagataatttcttcggaacctataacgtgatggtggctaaagctcaattgaaaggtcgtcagcaagagttttacgctccaccgctacaactagaacacaaagaacctaaacacgttcctgtgagcaatgacgaggctcaaaagcatctcaaatcattgatggaaagattaaaaatcaatggtcgtaaacctgcaccagttcaaaaacttgaggcaaaagaaaaagagcctgagcttgcaaaagaattaggtccagatcctttcgacaatccgcacgaatacgctgagatgtgccgccgtgaaggtatgccaatacctagaaatattcttcagctaattgatggggcgaatgcatgaaagcatctaaattgattagagataaaggactgcaatacgcgaaggaaatcgtagattcagcacccgataacgcaactgaatggaacgagggttatgagttccaatgtggtcaaagtgtagaaatcagcccagcagatcgtgagaagtattttgtagatttggttgagcttaaacgtctggtggagtctttgaaaatcatcagcgatttaggtggagttgagaagctaacgcctgcattcattacgacagataagcatgttggttacacgcatgttcgcatggtgggaaatgggagattgagctttcttgatgatttttgcgacttcattccagatggttccatttcaattaagcgtgtgatgactgctatccgcgaccacgaatcaatatacggaggcggtgaatctcatgccaactagatataacacaggcgagtatagctacaatcttgaatatcactatggagatatgtcagcaagcatggagatgcttagagcacgtttaattgaattgttgactcctcatctgtctggccgttatgtgaaatggagagaagcatatttcacatggtttacaaagtgcggcggggattcggggtggatgttttgtgtaggtccacacgaatttcatattgatggggcgttaaggcgctattactcaggttctattgatattacctacaaccagaaagatcgatatttcttggtgggtgagaaaaagaaagtcaaatgtaaggcttgtaaggggtttggcttcattcgagatgatgggtgggggcatatagataaatgtgaaatgtgtgatgcagaaaaaggagccagccatgagtgagtttgagggtaaatctggaaagtgggcttgggagattcaaaaagaacaacaagcgaaagtggaggagctgcaaaagcgtttagatggggcattaaaagagactcaatatgctttgcagtatgttgaagaagacatgcgcggcaatcatgaatttctacaaatggcaatgattcgaacccttaaagctatagagcaagtgctcaaaggtggtgcttgatgtcatcagtcagcattgctgaataccgcaagttatttcccataaagaaaaataaaaagcgccgttcagcaaagcaagttgccagacaaccaagtgtgggtgaagtggttctggcaacgcatttaagagcatgcaagattggttttgaacaggaatataagttccatcctgaacgcaaatggagagcagattttttaataaagggttcaaagattttgattgaggtagaaggcgggatctggagcggaggccgtcacacaagaggtaagggctatttaggggatatggagaaatacaactccgcagcaatgatgggttttacagttttacggttcagcacagagcaagtgaaagcaggcgtggcgattaaacaaattgagcaattggtgggatgaaaatgaatatgccagtacaacaacacattttacaagcggtcgattggtctagatttagttttgaagagtggtgtcgccagcttggagcttggctaaacggcgataccgaaacaatggtcaaaattgttaagacgatgccaacaaaacgcatcactcaaaaacaaagagaaaaattaatagctatgtatatgagcgatgaaaatctaaaagatcgtttatgcattcgccgtaagggtacttgctgtgagttaaatgacaatgaggcacgtgcaatccatagattgattattgatattaaattaattgaagaccatattttacaagaatggatctcagcaatttggtcacatcatgttatgggcaattcattacgtgatattgctcaaagtaatgacacttcagttaatcaaatcagacaggatttaaaatgtggtatggcttatatcaaaagtcgaaatccgcatttcagatttgaaacttttgaaaaaaccgcttgagtgtgcgcacggggtatggcatatttgtgatacagtgttggaagtgtaagtaaatcactggtattaaagctcatcaaatgatgggcttttattttatcagaatgaataaactatctttaaatgaaaatatcgaaaaatttattgcaacgatatttaaatcgttgataataaaattttctttgctaaaaaaactgcatgagaatcatattttctttaattacgtttgtcttattttcatttatttcctttatccttttaaggaataaatatattgagccaaaccacttcgtcattttgataatattttctgcaattgtatccgcaataattgcatattttgatgaggttcaagagctatctattggaggcaatatcgttaaactaaaagaagcaaaaaaggagttacaagtaacaatagatcaattaaagtcaattaaagtttcaacatatcggatgttacttttgaaaagtttacatttttcaggtgtttttggaagcagccatttagtggatagtagagcagaatattttttttcactcatcaatgaaattaaacaatcggattgtttcaatgatcttaagtctgaaataaaagttcaattaacaaggttgttaattgatcaattaaataaattttatcctttattttatggcaaacaattcaatgatagcgatgaattccctaaatctacggttttttatatcgagttgaaagatgagattattgataaagttcatcaaaaacggacacctgttataccatttgatcaaaaaaagcaggaaattgttacagctatagataactatgcagctttgtatattttatttaaagaagttgaacagtagggtgatattgattttttattgcttaataagatgaatttaaacgatattattttaattaataatctccaatgaaaggatttttaaacttttacctttacgattctatagaaaagttgccgagcatagtatggcacaagaagctctgctaaatatcgattattggcggggctttttatttaataaataatcataaaatttttattactttaattttattgataaaatataaattaaacctcaaaagctatatgcagaaaaaatatgaaaaaaggaatttgtaaactatgcgacctagaaaaagaattgaagcgctctcatgttattgggagagcagtttttaaaaaggctttaaatggtgcaaattacgctttaagacttgataaacagcataaaaaagtgattaaagatcaagatcagtgggccacatatatgctatgtggagattgcgagcatgatttaaatacaaaatatgaaggctattctctagatattttaagaaataaaaagaaatctgtaaaacataaaaaaagagataatcactatgaaattcagggtgttaatcaaaaaaaactaattttatatttaatttctattatatggagaggaattgaatctagtcatgaagtttttaataaattgaaattttttgatgaatcgccagttgcaaaaaattttttaaaagaatgtattaagaatgatcgtgtagttctaacagaatgttacgatgtcagaatttcaaaattagtaagcacgataacttcttttaagaatgaagagttagattttataactgatattcattgtagtattgataataatgaacgaattcgttttttaactatttttgagggatactgttttgaatttttttactatacggattcatctcagtccgtttctagtttaggagttcttaagaaaaataaacgaatacttagaatgccatatattgatgttttttcaattcctgagtttcgaaaaagtctgttagatatgcttgaggcgcaaaatagtaactaaactattaatagtttagagatttaaagaaaaatcacttttacttaagttttaaattaccaagtcccgaatagggactttttaatggaactaatttatgaaaaacgaagttggctttcatgttcctgttcgtccaatgcctccagaatggctttttgaaatggatacacctaactttgttccagcgccagaattatgggaatggataagaaaggtttttctagaccctaaatctaaattatttaaccctgatcatatgcatttacggtcatttcgatatccagatattgctgtgatgtgggctagatctggctttaaaaagcaaggccgtcaggtcattgggactactgaaaaagtcatgatcaatgctggtggctggaagaaagaacgacaagaagaacaatacatccaatggttcaattatttacctgaatacttaattacttttgatgcttcatattcacgtatagcaagtgatgtgaacttttgtgctttggttgaacacgagctttatcacattgcacataagaaggaccaatacggaacaccagcttataacagagaaactggtatgcctaagttagctattcaaggtcacgatgttgaagaatttacaggtgttgttcgtcgatatggagctagtgaggatgttatgcggatggttgaagcagctaataaaagaccgcagctgtcacgggcagatgttcattacgcttgcggcacttgtaacttgaaggtggtttaaattttttttgccactctacttggacgtacttggacggatagagataaatggcaaggcttaataaacgggtgaaactctatatagtacggtcacttgctacctatgagacacctagtgaaacagcaagaggcgtccaagaagaatttggtatcaccgtaaccaaacagcaatgtgaagcatacgacccaacaaaaaaacaggacaggacttaagcgaagaatttaaaactgagttctacagagtgcgaaaggaaatgaacgacaaccttagcgcaattccaatcgcaaacattgcctaccgcctcaagcgtctacaacggttcatcgatcatgaacaattcaaagaaaaccctgtcattgtgccgagccttttagagcaggcagctaaagaggttggcggcttatataccaaccgtaaggaaataacaggggctggtggtgggccagttaaaacggaaaatacagaaaagccacctcaaccagcatataaacctgaagagctttcgaaactctcgcctcaggaactttctcgcttagtgattaatggaaagctatgacatacgcattagatgaaatagcccctttaattaaagagtggactattaacgtacgcctgcctgaagtaatgactgagatgacacggcgttattactacaaggctgcaattgagcaaaacgaacttagcattcaagcagagctatacaagtgcagtaaggatccagtccattggtttaacaattggatatggacatatgatccgcgcggtatggcttttggtttacctgccaatattccttttgtattacggcctaaacaagttgagcttgtggagtggctagaggaacgtgaaagcacccaaacacacggtctaattgaaaaatcccgtgatgagggcatgagctacgttgtgctgggttttttcttgcatcgttggttattcgttgaaggttttgcaggtggtgttggtagccgtaaggaagagttggtagataagaagggcgaccctaaaaccctatttcataaattccgcgatatgttcagcaaaatgccccaatggttaaaacctaagggctttgtcgagaaagtgcatgataactacatgcgaatcattaacccagataacggcgcaactattactggtgaagcgggtgacaacatcgggcgtggtggacgtactacgatgtattttttggacgaatgggcattcgtagaacggcaagaagctgtagatgctgccatttctcaaaacaccaacgttcatattaaaggatccacacctaacggtattggtgatcgatttcaccaggatagatttagtggtcgttacgccgtctttaccatgccttggcgagctaacccggataagaactggaccgttacctataacggcaaagttatttacccatggtatgaaaagcagctggccacacttgatgatgtggttcttgctcaagaggttgatattaactatgccgcttctgtagaaggcgtcttaattcctagtacttgggttcaagctgctatcgatgcgcataagaagcttcagattgagccgactggtgaccgtattggcggcttagacgttgcagatgaaggtaaggataaaaactcttttgcagcacgtcacggcgttgtcatgacttacttggccacatggtctggtaaaggcgatgacatttttggaacgactcaaaaagctatggatttctgcttcgagaaatccatcgatacgctgttttacgatgccgatggccttggcgctgggtgccgtggtgatgcccgtgtgattaatgaaaagcgcagagagctgggcttatccgagattaatgtggagtcattccgcggatccggttcagttcatgaccctgaaggggaaatggtagagaaacgtcttaataaagacttttttgccaatttgaaagctcagtcttggtggtcattacgtttacgcttccaagaaacttttagagcacttgatgggcgtgattatgatccagacatgatcatttcactatcaagtgaagatatcgatgccaaggaattagcactactcactactgagctatctcaaccaacgtacacaaaaaacggtgttgggaaaatcctagtcaacaaacaacctgatggcacagcttcaccgaaccgggcagatagcgtgatgatttgctttaacccgcaaattgctgagctcaatatttggggcaagctataaagagaaagttatgggcttaattaaatttacaagagattcgttccagaactttgcagctcgagttgggttgggttctggaagtcaacacgatcaatcgacttatggttttaacttcacaagccgaaatcgattgaagcttgaagcgatgtatcgatcaagttgggtggttgggcaagcggtcgatgttgtagcggatgacatgacgcgtgaaggaattaacatccgtggcatggatgatccagaagatgtggaggcaattaaccaggaactagatagcctgcaagtgtgggataagatcaatgagacaatccgctggtcccgactttacggtggggctatcgctgtaatgttaattgacggtcaaaatgtatctaccccacttaatgtaaatactattggtaaagatcagttcaaagggttgcttgttttagatcgctggatggttttacctgacttgcaagatctagtcaccgagtatggtccagattatggaatgcctaaatactatgatgtcattactgactcagtaggcttatgtaatcagcgcattcattattcacgtgttttcagaatggatgggattaaactaccttactggcaggctatagcggaaaatttatggggccaatcagttattgagcgcttagaggatcgtttaactatttttgatagcgccacattaggtgctggccagcttatctataaagcacacttacgcacatacaaggtaaaaggcttgcgtagtcttattgcagccggtgggcgaatgtatgacgctttggttgagcagatcaatcaaattcgtctatggcaatctaatgaaggcctaacgctgatggatgctgaagatacttatgaagcccatcaatatagctttgccgggcttgataatattctgatgcagtttggccagcaaattgctggtgctttgggtattccattagttcgtttatttgggcagtctccagcggggtttagtgcaactggtgagtctgacttatcaaactattacgacaatatcaaccagcagcaagaaggccgtatgcgtacgcctttacataagttgcttgaaattgtttcgcggtcaaaactaggtaaacctctacctgattcatttaagtttgatttcgcttcattgtggcagatcgatgacgagaaaaaggcagagattgcggccaaagttgccgaggcagttactaaggttgaagaggctggaatcatctcacgtcagacggcgttaaaagaattgcgtcaatcaagcgaatctaccggtattttctctcatatttctgatgaggaaattaaccaggctgaagatgatccaccgccgccaaaagaaggttatgacgatgaagagtcaaataagtcggatatcaccgcacctggcgaggaagaccgagatacggtacagccagcagcttagaaagattgcgggatacattgatatgatcgttaaaggctttgatgtaaatgatccaaagtcatacccactgatgattgcgtcattaaacgagtatgcaaacacgcttcagttttgggcgcaaaatgcagctggtcgaatcattactgatgtcgctttaagggatgagaaaacttggctcatttatgcaaaggatttatcacgtggtgtacgtgagcaaatcaggaatacggacactggagccgtatatcagcagcttttaaatgaccaagtaaggcttattaagtctttaccacttgatgcagcacagcgtattcatgacctgtctactcgatcgctaattgaaggcaaccgttcaagtgagattgctggcttgattatggcaactggccgtgtgacaagatccagagcaaatacaattgcccggactgaggttagccgagcatcatgcgtatttactcaagcgagagccgaaaatcttggatccgagggttatatctggcgaactagtgaagatggtgatgtaaggccaagccataaggcaatgaatgggaaatttgttgcttggaacagtccgccaactttggataatttaaaaggtcatgccggatgtttgcctaattgtcgttgttatacggaaccggtaatcccaaacttttgagcctattgtgcaaagctaaattgctgctatatttgaatattccaaattctggagaataaatatgagtattaaagctggagatgttgtacaactaaattcaggcggttatgcaatgactgtagaaaaaaattcgcaaagacaatggtaaggcaacatgtgtgtggtttgttgatggagaaataaagtcctatgacttcgcactagaagcattaaccgttgttcaataaggtctaaatatcttaaaaccaccctcgggtggtttttttatgcctgcaaaaaaggtgatccatgtttaaaaagaaaccgaaatcaaaggccacggtagatagatctaatttctacactactggccaacttggtagaacacgggaaacaacgcctgaaggttatttgctttgccgagatgttccattagctcggattggtaaattgctttatgccgatggtgaagtgccagttactgctgacaactccggtctaatcatcattgagcgtggtgaagatgttttatttgatccacgtacgatcgccagttttgaagggaagcctgttacagatgatcatcccaagggttgggtaaccccggagaattggaagaaactttcaaacggaactgcacatgatgtacgccgtggtgaggatgaagattctgattgtttagtggcggatctgctcattacagacaaagacatgattgatgctgtgatgaaaggaaaggttgaaatctctctagggtatgacgctgattacacggaaattagcgtaggaaaagggattcaaacaaatatttttggaaatcacattgctctggttaaaaaggggcgttgtgggtcgcgttgtaaaatcggagatagttttatgcctaaacagagtaaaggctggctggaaagcttgcgcaaagctaaacgtacaattgatgaggctttggaaaaagccaagagcactgatgaggaggatgtcgaaaccgaagatgacgatgaggatgatgatggcaaaacaactgatgctgcaatcaatcgtgaacttttaaaaaccctcaaaacagttcaaacaacagtccaaacatttgatgagcgactctcaaatctggaaaagaaaaaaccaaagattctgaatcggaaactgaagatgatgatgaagaagacgatggtaaggggaaagaaaccgaagacgatattttggaagctgaacaagctcaaaaattatctgaacaaggtattcaaaaccataccggtgattcacttcaagaagttttatcacgtgcagaggttttggtaccgggctttaagatgccaactttcgatagtgccaacaatggccaagctgttttaaataccaagcgcaatgtattaaaacaggcttatgctacggaagatggccaaaaagccttgaagccgtttgtaggtgctactccgaactttgacaccatgccagcctatacagtcgatgctgcatttattggggcatcggaactcatcaaacaacaaaataacgccgctggtgtacgttctggcatttctactcgtgattttggccgagcgccaatgacaccggctgaaatgaataaacgtaaccgtgaatattgggcaaacaaaggaaattaataaatgggtaatgcatatctatatcgtatgccgtcaggcattccaggtgatatttcacgaaaagcacactccacagttgaagcacacatccttaaaggtaattttggcgcctttggtattttcggaaagctaacagcagatggaatcgtaccgcttgaagcggctgataccgatgtatacggcttaattgtgcgttcttatcctacacaatcagctttaaatggaattggtgcagctgttcctcaatcaggaattgtgaatgacatcatgcgccgtggttacatgacagtaaaatgtaacgctggtacagcgaaaaaagccgggaaagtttatgtgcgtgtagctacaggaacagaactaaaaccgatcggtgggattgaagcggttgcagatggtgtgaataccatcgagatcaagaatgcaatgtttatgcatgatgctgatgctcagggcaacgtagaaatctcttacaacatctaaaatatttttgacgtaaatcacggcgctatatgcgtctttttttacgcctggagaaaatgaaaatatgagtaaattactcttagcttcgaccatgactcaagccgtagcaatgggtcgaccaattcgagcgcgtacccgtgattctggaacaatgcatacctttgatgcccgtacgattgatagtactggtgcattcctattaggtgaattggaacgcctcgaccaaactctacatgagccattagcaaatattacatggggtcgtgatattgacttgcgctctgatgtatcaattgcagatgaagtatcttcattcacaaactctacatttgctgcagctggtggtccatcacctaccgggaaatcttggattggtaaaaataccgatgctattgcaggaattgcgttggatatcggcaagactgcccaacctcttagcttatggggtatggaaattggttataccattccagaattggagtctgcacgagctgtaggccgtccagtggatgaccagaaatttaaaggtatgaatctgaaatatcaaatggatattgacgagcaggtatatatcggcgatgacacgcttggtgtagaagggcttttaaactcttctaaagtgggtgcgaccaacgttaataaaaactggaaactagcaaccccacaagaaattttagacgatgtaaaccttgtcttaaataacgcttgggtggcttctggttttgcggtttgcccggacaagcttttattgccaccagttcaatttagtctcttaacttcgcgtattgtcagcgaagcagggaatatctctattcttgagttcttgaagctcaatagcttaagtaattcagtgaatggccgacctctaaatatccagccttctaagtggtgtgtaaaacgtggtgcgggtggtacggatcgtatgttgacgtatacacagtctgaagatcgtgtgcgcttcccgcttgtaccgttgcaacgtacaccgatcgaatatcgtggtattcgacaaattactacctatttcggccgtttaggtgttgttgaatgggtatatccagaaacagcttattacgctgatggcctataaggggtgagcatgtctaagttagtacaaattcttctaagtaagccgctaaccgttaaccttggtcgtgatgaacaaggggaagcaaaaacaatcgttttgcaagctggaattcaagaagttgaagaagacgtggccaaacattggttcgtgaaagctcattcacaggaaattccagcacattcagcatataccaatgagcttgaacaagtccttgagcagaaagatcaggaaattgcagcaatgcaaatccagattgatgaagcagcaaaacaaattcttaagcatgacgaagaaatgaaggctaaggataaagaacttagtgatcttaaaattcagtcagcaaaagaacttcaagaccgtgacgctgaaattgcaaagttgaaggctgaattaactaaagctacaccggcaaaagaaaaggccacaccaaaggaaacctaacacatgatcagtgaatcctcttttcgtgaagaaatgccggcatttgctgatacaacgcaatatccatcatttcagtttaatttctacttaaaccttgggaagaagctgcttcgtgaggaacgttgggaggatatgctcgattatggtttaacactgttcatagctcattatcttacgctttaccggcgtacgatgagtgctgcaagcattggtgctgatgctggcaaaatcgtaggtaatgagacgtctaaatccgttgatggcgtttcaaaatctatggatgtttccggcgttctcattactgatgctggtcattggaaccaaacgacttggggcgtccagttttatcagttattactgatggctggcatgggaggcatccaattatgagcagtggtgttaaatcttctggtaatggtttagctgacattttccaagctgtagctgaactttctcaaatggatgttttggtaggtattccacatggggaggctcgaaccgatggtgacggccttaccaatgcgcagattggttacctcatggaaggcggctcaccttctcaaaacattcctgagcgacctttcctggtgccgggtgttgaagaagttcaagaaccggtaggcgataagctggttaaagcggttgacgctgctttagatggtaatagtcagaaaatgatgaaattgcttgagtccgctggaatgattgcaatgaattcagttcgggcttatttcgttaatggtgaatttgcccctctatctttggccacaatccgtgctcgagcacggcgtggccgtaaaggcgctaaacagtatcttaaacagcttgaaactggtccagctgagtctggcctagttcggccgttgattgatactggagagcttagaaagttggttacttacgtgatcatgaaaaaggaaaaggaggtaaagcgtggctcaacttgatgtttcagacgttttgctagatccagacttcatggacacaggcattatttgtaagcgcacagaggtcatcgtaggaaacaatggacgatctcaagaaacgactacatcaacaccctttgatggcgtagttactacaaataatggcctcaatatggaccgtcgagcagatggcacattgattaaaggcgcaatcaacattcacacgcagtttgctttaacttcaggcgataaaaataccaaagcagatgagattacgtggaagggtaaaacctacattgtggctcaagtgctggacaatctacattatggccaaggtttcataaaagcaatttgtgagcttaaaccactggggtaatcatgggtgattctgcttcagggggatatattacccctagtggcggatctgcttatgaccaagacctagaggacatctttcaagccttcattgtcgggattacatccttaccaggtgatatggttcgtccacgtttccaaagagaaccaccgccttttcctgaaattggtgaggattggtgcgccttcgccgtaaagtcaataattcctgatgatgggccttacttcgaccagaaagacgaaacaatggattcaattcgacatgaagaattgacgctgtttttatcgttctacggcgaccacggccaatcaattgcaaacgtcctaaaggatggtctaggcattccgcaaaacatcgcgcaactcaaagcgcaaaaaatcaaatttatcaaggtgggtgagatcatcaccgcgcctgactttctcaataatcagtatgtacatcgatatgacctaaccgctgtctttaagcggcaaacattacgcacgtttgctgttaagtcatttgtagatgctgggccgatagaatttcctaggagttaatccatgacattgcctgtttcagacgttgttaatgtctccattagtttggcggcattagcagcagggccacgtagcttcggtaatttacttattcttggtgccacggatggtgttgtagatccagttgaacgtttacgcgaatactcgggtcttacacctgtagcattagattatggtaccgatgcgccagaatataaagctgctgaattgtactttagccaatccccaaaaccacgaactttatatattggccgttgggttaaatcggcaagttcagcggttttaaaaggtgcggttttatctgcagatcaacgtgatatttcaaacttcacagctatttcagatggttcgatgaaaatcaccattgatggttctgaaaaggttgtaactgccctgaacttatcagctgtcaccaatttaaatggtgtggcatctgccctaacagccaagctgggtaccgcttcagtaacttggaatgatgtttataaccgttttgaaattacgtcattaaccaccggtaccacttcgacaatttcctatgctattgccaatgcaactggtacagacgtttcttcattgatgggtttaaccgttggtcatgcttcggtaccagtaaatggctatgctgctgagccattgatggatgcaattacacatttagcggacaagtcacttaagtggtatgggttagatatcgctgagccaatttctgatgcagatgtgttagaagtggcagcattcattaatgcgacttcaccatctcgcatttatggccagacaattactaactcattggctttggatggtaccagtacagccgatctagcctacaagctcagtaaattaaataacggtcgcgtattttcgattttttcgggtgatacggcacatgcagcagcttcagtatttgggcgagcatttagcgttaatttcaatggtaccaacacgaccattacattgaagtttaagcagcttccgggtgtagccgctgaagatctacaagtttcccaagcaaaagccctaaaagataaaaactgtaatgtttttgccggctacaacaatgacaccgcaattcttcaagaaggtgtcatgtgtgatggttcattcatcgatgagcgtcatggtctcgactggttgcaaaaccatttagagacggcactgtggaatcttttctataccacgccaactaaggtcccgcaaacggaaggcggcgtaaatcgccaaagtactatgcttgaacgggcattggagcaggcagtaacaaatggccttattggtcctggtcagtggaatggtgattcttttggagcagtagaaacaggtgattacctttctaaaggtttttacgtttttgcgaacagtctagatgatcaagctcaatcagaacgtgaagcgcgtaaatctccggttttccaaattgctatcaagatggcaggtgcaacacatttctccgatgtgcttgtttctgttaaccgctaataaggataagaaatatgtctacatattcatttatggatactcaatgtaccctcgccagtgatgacggggtaattgacctaggttacggtgcgggcgttgcagatgaaggcattaccattgcaatggctggtgatgcgaacactatgacgattggggcagatggtgagggtatgcactctctgagcgctaataagtcaggtacggtgacagttcgcctattaaaaacatcacctattaacgccaagctttctaatctttatcacattcagcgctcaagtactaagaagtggggaaagaacactatcacactaaatcacgctggatctggtgataacgctacggcatcaaaatgcgcattcaagaagcatacggacttggcttacaagtcagttggtgacttcaacgaatgggtattcgatgcaatcaagattgatcaaaagttaggagcttatgactaatgcaaatcggtaatcataattacgagattggtcgtttagatgcatttgatcaatttcacgtatctcgaaaaattgcacctattgtccctacgattgttcctttcatgactgagatactgaaaagcaacattatggatctattagataaatttggtgatgatccagacaatccagatctaagcgttttagaggactttgatctaaatagttttggtgaagcgatccagccatttatcgatgcattcgcaaaaatgccagaagaagatgtcaattacgtgatgaaaaagtgtctttcagttgttacacgtgacggggcaaaagtggtagtgaaagatacattgatgtttgatgatttaagcgttgaacatattcttccgcttactattgcagtggtgcgcattaatttgggaaattttattcaagggctgcttacgacggcattgagcaagaaacagcccacataaagtttaaacatttaccagaccacgaagattggcttttacggccagtcattcgtggtctttgtcgttttgaatctttaaaagatggaactttagatcttgcagatattgcattgatgaatgatgcattagatgtgcaggcagataaccagcttttactcgaacgataccacgaacaaaacaaaggttgagttagacatgagtgatacagttattcgtgacttctttgtgtccttaggtttctctacggacaatgaaggcgctagaaaaatggttgatacccttaaaggggtagagctaaaagcggctttgctgcataagactttattgcttcttgcaactggtgcagttgttgccgtaacaaagacagcaagtgaactcgataagctgtattactcatctcaacgtattggcgcatctgcttcaaatattcgtgcttatggtgatgcaatctcacaaatgggtggtaatgctcaaaatgcattacagtcacttgagaatgtggcgcagaagatgcgtaactcgcctggttacgaaggtatgttaactggcatgggtgtagctactcgtgatggtaacggccagttgcgtgaccgtgtggaagtaatgaaagacctttcaaagacaatgaaaggcatggattactaccaggcaaatgcttacgccagttcattgggtattgatgaaaatacccttatggccatgcgcgatgataagttcatcgacaacatggagaagtatcaaaagttacgtcaaagtgttggcttaactgatgagcttactaagtctggtaccgatttcatggttcaattccgtgatatcaccatgacgaccaaagccattacagaagtggttgtaatgactgcagggcaagcacttattccagtgctgaaggtgatcaataatttcttacgtagtgcgattgcatggttcgctgaactggatccgcgttttaaagctatcttggccactggtttaaagtttgccttgcttgcgattatctttggtggctttattggcacaatcgctaaattagcttctgtgctgccaatgctgaaaagtctactctttttaatcaagtctttacgattggccttcctggcttctccaatcggtattgtattggcgcttgccgctgcaattgctgctttgtgggatgactaccagacatggaaaaatggcggtgaaagtctaattgactggtcaaagtgggagaacgggattgaaaccgcaattagccgtattaagcagttggccgagttaatcaaaagccttaaggataaaactgtagagtttgttaccaaggcaattgatgatccagcaggaaccgcgaaagagacagcagaagcagctacccaagctgctaaaacgggtgcagcagtagttgcgaatgtagctaagacaaccgtaagtactattaagaaaagtgtttctaagagttatggttttagctttggtaaagatgttgatagatacattcatgaagctgctacaaaatatggtcttgatgagaaggttttacgtggcttcgttaaaatggaggatggttggactgggaaaatgtcacctacaggagcgattggtaccggtcagtttattcagtctacttgggataatctggcaaaaaccgctgagggtaaagcaattggtatgacaaagatcgggaagagatttcgtactaaaaacgatcctcgttatgacaagcatattaatactttagcaacaggtcttttggctaaacagaatgcagatattcttactaaaaatggattagcagttacgggggagaatctttatttactccataatattggaccgggaattattcctgctttaaagggttctaataaggtgtctgctaaaactcttgaagcaataagagtaaataccccaattaaaggtcaaactcctgtacagtttgttcaatatcaaaaaggacggtttaagaagcattacaactcagcaaatgttggcgaaaagatcattaataatggtgagactaagattaataattttggtccaccaaatggcaatccagacaaagcccaagttaataattcttcaaatatgtctgctaaatcagtagtaatacatcaaagctataaaactgatatggtaatcaatggtgcaagagagccagtagaatcagcgaacgctgtaaaaaaacagcaagaaaatacgatgattcttttggctcgtaacactaaaagtttaattggttaattggcatcaatatctgtttttagctgttttgcacgatcattatttaactggacgatacagttcgcatgtgcgtttctttcaccgtgatagaaactataagttgtgcaatagctgtcacggtaaagcaaccatgctttttgtgatttatttaaatcatttatgacattaggattataagttaactgttccttggaaatttcttttaactttttaagattagaggtgactttcgcaaaggattcgtcttcataacatttcgctacatcagtaggttcattaaagtaaatttcgcagttagcaaaagtgccgaaacttaataatgatgctgttgccaacaataagattctcttcattaatctttattccgaatagttgtagagatatttaaagtatcactttgatctttactatcagcaatactttcatgttttttataatcttcttcagtggggatgtattcgtgagcagctttttcagcttctggtgaaaattcctccttatcactactatctgaatttttcttttcagttaattgtgtagaagattgcgatttattaggggtgttatcaaattttgccaagtaaatggcaaagccaatagctacaattactacccaaaatatcagtttgaaaaagaacttaaagcaaccgccttttgattcatacagttcatttttaactgaaaagctttggccacaatttttacaagtgtattgtgatttaagtatatttgatttgcttgaagcaaatcgtgtctgcttactattacagtagggacaaattggtcttgatgatgtgctcacaagaattaacctttattttaaagtgatttatctttaatcaaaaattatataggtttagttcaagcattgagaagcaacattttttgaaaatatttaaacccaccacttggtgggttttttattgcccggaggaaagcatggctatcactgaaacagttggctcactattgtttggtggtcatcgttcaataatgggtttatttgcagatgtagttattgaagagaatcattctgatgagcttgtaataacagagcatcccgttgaaaaaggttcaccgatttctgaccattgctataaagcaccgccagaggtcaccatgaaaatcgggtggtctgaaagtgctggaaggatgaatggtcttattggtaatacatttattgggtcagatttgtcacttcttggtatttatcaggggttacaggccttacaaggtcaacgacttattatttctactggtaaacgcctttatacggacatgttgattaagtcattaaagaatgtcactgatgaaacgtccgaaaatgctttgatgatcgatattgtatttaagaaagtttttattgtttccacaaaagaaacgctggtttctatcgctgatcaaaagaatcctgaagtaacttctgatgttgttgattctggtaccaaacagctgaaacaagttaactcttcagtattgaatactgttttaggaccagctgtagatgcttttagttcattaatgagtggtaagtaaatatggctttgtatgaaatccctttgctcgatcggaatcagaagttttttatcaaactaaataaagtgaattatcagctcaaactgatttttctaaagcgctggtatctagatatctatcaggcaaatgctgaaccaattgcccttggaattcctttagtttcggggttagacatactaagtccttacagtcacatgattaatggctcaatgtatgttcaaaacttaaatgaagatgaaagccaatcatttaatgacttgggcactaacatcaaacttttttggcaggatccagaatgagtgaacaatggaagcgtaattgccggctaaccgttcaacttaagtatggggagcctgaggcattagatttatctgaaatgcgaattgtatttcgaataagtcagcctacggccgaaacgcctaaggcagcagagttttatatctacaacctttctgaagacacaatgaatcgcttggctggtgaagataactcaaatgtcggtgctatggtcacttttgaagtagggtacggtgatgagttgtcaaccatttttaaaggttcaacttttcaataccggcgtggacgtgaaagccctacggataagtttttatgtattctggcccaatcgggcgataaagctaaaaactatgctttagtgaataaaaccattgctgccggcacgacagtagatcaggtaaaaaatgaaatcgccaaagagtatcaggctaatggtgtagaaaccggtgaattgccacagcttagtgatcaaacatatgttcgcggcaaagtcatgtttggttcactagacgatcagatccgccagttttgcaaagacacaaatacggagtacttcattgatgatgaatacctctacattgtcggaattagtagttatttgctggactctgtatttgaaatgaatgcaaatactgggatggtcggaatgcctcagctaactactgaaggcttaatggtgaattgcctccttaatcctcaattacgccgtggtagacgcatacatgttgatacttcaagtatccagacacaagcttttgatattgattaccaaagccagggcgttgatcaaccacaaaaggatctaaaaacggctggtggtattaatggtatttacatcatcaaggcagttgagcactacggagatacacgtggtgatgactggtatacaagcacagtttcagttggtcagggtgctgtagttcctaaatctggtattacaattacggcggtggattgattatggctttaagtaataacgaaagatcgccccatttgcttaatacaatcaacgatgcgattaaatctgctctagcagtactgtggactaatttgccttgtatcgttgattcttatgatccagataagcaaacagtatcagttacaccagctattcagataccggtaatgcgtgaagatgggtcaatggagttagtggatctaccattaataccagacgtgccggtatgctggcctaaagctggaggctttgctttaacatttccagttaagcggggtgatgagtgcctagtacatttctcctctaggtgcattgatttgtggtggcaaaacggaggcattcaaccaccgtttgaaaaccgtaagcatgatttatccgatggcttcgctacatttgcgccgcaatctcagcctaaacgtttaaaaagcgtggccactgatgcagttgagttaagaaatgatggaggcaatgccaagatccggattaatgatgctggagagttggagtttttaggtaccaaagctacttttaattgcccggttgaaatgaaagatgggttaggcgtcttaggggcattaaaaaataacgatgtggatgttggatctagccatggccatacgaaagtacagccgggtaatggtgagtctggtccaccgaaaccataaatgaatgaggggtcgctgaaaggcggctttttttatgcgctatagaaagctagatgaagatggggattatagctttggccaaggtcaaaataatttccatagtaatacacctgagggtgtagcgcaggcggttatgacgcgtcttaagttttgggtaggtgaatggtttgctgatacttcagatggtacggggtggacaacagacgtgctggggaaatacacagatcatctttttgaattgatgattcaccagcgcattttagagactcaaggtgtactccggattgattcattcgatagtcaatttaatggagaaacacgcacgttatccattcaatcatccatcaccacgatctatggtcctgccgatctgcaaggggatatttaaatatggcactaactagcatagccccagtaattaaccaatatggcgtaacagtttcaacatacagtgaaattgttgagcaccttaaagaaaaatgtcgagaaatttatggccaagatgtttacttagaaaatgatagtcaagatggacaatggattggtgtaattgctcgtgtaattgctgactgtaatgcggttgtttccgacgtttacaactctatgtcgccaagtactgccgatactgatgcgctttcacgcaatgtcaaaatcaatggcattcgccgtgcagtggccacaaaatcaactgtatcagtggttttggtgggcgttgccggcacaatcattaataacggtattgtgagtgacaaaaacaataaccggtggttgttgccggcacaagttgttattccttcagaaggtgaaatagttactacggcaatagctgaaaagcctggagcaattttggctttaccaaattcagttacgaccatttcaacacctacacgtggttggcaatcagttaataatcctcaggcttccacattaggtgcgccagttgaaagcaatgctaaattacggcaacgccaggcactatcgactgctattccatcgcgttcttatactgaaggtattttaggtgcgttgtttagccttgatggggtaagccgttgtaaggtttatgaaaataaaaagtcattcgtagatcctttagggctaccaccaaaatctttagcggtagttgttgcgggtggaaatgatcaattgattgctgaaaccattcgggtaaagaaagcgcctggttgtgatctatatggaaatacaactgtgattcgcccaactgtctatggagatccagtagaaattcaatattggcgacctattcaaaagtctattggtatccgttttgaattaacgactaattctgattacacggtagatattggtgagcaaataaagagcgcttcagccgattacattaatcagctcgatattggtgaccgtattgcaattaataagctgtatgtaccagcaggtttatacggtgcattggatgccaggtcttatgaaattgaaagccttcaattgactgtagacggcgtaccagttgagggtgattacaccttggcttttaacgccgtggcctattgtgattcagacaatatcgagatcagtgttgctggaggtggttaatgcaaacagatgattacttgaatctgatcattaatgagcaccgatctaagcctaagtttaaacagacagtcaaagaatcaatagaacctattcttgattgtataaacgtgctgcaaagcataaatgagaagtttgacttagatacagccactggcgatcagcttcacattcttgccgagtgggtgggtgcgccactggttgttcctaatattattcctttaccgttctttggtttcgaggggcagcctgaggcattaaccttcggtgaaacggataacccagatattggtggtttttggcgcgaatcaggtgtcagtagttatcgtggccagagcaccccccctcaaaaattaccctcagttgttaaagctaaaatcttgttaaacaactgtgattgcactctcgatgaagcatttgaaatctgcaagctattaactgatgtgcctttcaagctaaaggacaacagagacatgaccgttacttttgaatttcttgcagagtttcaacctatagataaagaactagtccgcttgttatttcctttaccaagtggagttgagctaattttttcggatgaagtagatggataagttagaagaatttagcctgaacgggccaaaaaataccgatggactaactttattaagtggctttccatcaaatcagaaacccgctcgtcaatggtttaactggttatttaattcaataaccaaaaagattaatgaaatcattgatggcaagctggatgcaggtgctaatgctgtttctgcagcaaagttagaaaagggacgaaagataaatttcactggtgtaatccagggtagtggcacatttgatggctctaaagatattactatcgatacggtcgacggtggaaccataggtgaaaaagctatcgctattattcgcctcaacggctcaacgttcgatttagtcaaaagccgtggctttgcttcagttgaaaataaaggtggcggccaaatcgaatttactttgagtgaggatgcacctgatacagattatggcatcgtatgtactggaacaagcaatcgagctgatgcagttagcttgcaagagcgtgaagactttgcccggacaaacaccaaattccgtctgatgggagcatttggtggtgataatacacaaggtgcttatacccctcaaatatgcactgtagtcgtctattactaaactgattttttaaattttatgaccgccttctggcggttttttgttgcatggagatccaaaaagatggcaacaaactggaatgcggttttaaacaacacaaataacttcaatgatgtattggcaattttaaaaaaactgctagcactcatgggcgatttatctactcttgattcatcagaggttcttttacgtattgatgagattattaactcatcggttgctgattttaatgaaaaacaaattcaggcttttaaggatctcaaagaagcaattgaagttgctagtgcagccggagcaggcgaaaacgggtggatagatacactggtacttactttaactggagaaaatctcagggaatttaataaaaaaactatcagtactttagattgtattgatgatttagctactacattgccatggccaggccgcaccgtaaatgtacgatctgtgataaaagataaacatttagggggaggaacttttgtatttagtgctgatagttcaaaagttccagacggttatattgttgttgctgcaaatggcgggaattgggtgaaaatcacagttgcttttccaacaattgatgattttggcggtctgggtgacgacccaaattatgacgatgcggacgcatttattcgatgtgcgttgagtccatacacaggttcgaatatttatcttgctaacagacaagttgaatatcgcatcaataaacaagttgattgcaagggtaaagggattgttggaggtggatttagtagacaaaatgccactgcgtatgcaatgaactctctaaaggtaagaccaggtgattattcaaattcaaatacccttcttaataatgtggcatttattaacgtgggcgccgaagtaagagatttgcaattagtaagtgagggtgtttcagaaaatatttcgggtttaaaagttgatggttataacttcacactttcaaatgcaaatatttctgggttttacaatcaagtatatttatcgaatgcaacggtctcgttccgtgtccaaaatttgatgtcaattagtgcatcaaatgcagggttttatattgctgatgttgattctaaacaaagtactactgcatattttgacaactgctcatggcaatggggtaaataccctgtgctgtttgctaaagaagcttatcagtgcgtctttaataatattattcttgaatatatgcagtacggtttaacagcgggtatctggtcgaattgctcattcaatgcaatttgggcagagcaaacaagagatggggtagctcgtactggcttgtaaatacttcttatcaacaaacatttaattgcatcactaataatctatacattagaacgccttggctaaatcgagctgacacaaccgctttggctgtatcagataatattgggggggttgtaattgataaaagtcgaattactttaagcggtgcgacgggtgcgaaaatacaactttctccatctggtttagcaacactttttgctaattggtatggtggtactaatcgaagattattaattactactcaaccgactgcggcagattctgggtataaaacaccaatccacatcaatgcaccgaatagcgaattgtattttggaaatcaggatgaaacatcagttgcaagtgtagtatttaagcgagtaattggcgctactgctacaaatacaccttatattgcgtcagactcgtggactaaaaaaattcgaaagtggaatacttacaatcacgaagtatcaaaagtcgggcgttttattgcaccgatgatgctgacttaagatgtcaacttttactactcatcaaaatcaacgcaggctggtctatctccaaagagtctacgggagtctatagattgcaacgagatgcgggcgtaacaactgaattagcaaatccgcacatttttgtttctggcattttttctggaccgggattaggtggtggaaaggctatattgccaccgacgctacaagcaattgaagcatacagtgggagttggtcgtctttcaaagttgcagctggagtcaagttgttttttatagatttgacaggtgcgttagttgatccaatgcgcttctcagtatcattcacactagaatcaggaatttaatatgacctacgcagatatgtatgtacagggtgcactgccaaagattgaggcagacattgcacaaaacggagtatgtactctttattcaaagatgactttaaatgaagaaacaacaacggccatttcagatatacttcgtgaaaaaggcttcaatacggaagtatcaattgaagatgatcccgattttattggtagtcgatataagcttgtaattaaaaaagcatcgtaactacacagcaaaaccacacaagccctagctttaaataagttagggcttttttaatgccaaaaaatctggagaaataaatggaaccagtttccactagtggctttacagcactattaaaattttatgggtttgcaattgtggtggctttggcggccagcttggttgtagcagttgtattaatgacacgtatgccacgctcaccacaagagtgggcagtgggcttgatttgtacggttgtatcaagcctcgctggcggctcattcattatcgtgaaatgggggcttcatgaatgggttactgatatatgggggatgattgctcttggaggattcttctttgtttgtggtttacctggctgggctttagtccgctggatctttaacttcattaacaaacaggaaggtaagacgattattgaagtacttaaagaagttaagaaagctaaaagagatatcgaaaacagttaatgccgccttcgggcggttttttattatctaaaggaaagtgaaatgaacattgaacaatatcttgatgaattaattaagcgtgaaggcgggtatgtaaataacccagctgatcggggcggtgcaaccaaatacggtattactcaagctgtagcacgtacaaatggttttaagggcaatatgaaagatttgcctcttgaagtggccaaagcaatttatcgcaaaaactattggacagccccacgttttgatcaggtgaatatcatttcttctgctgtagctgaagagcttctagacactggtgtgaattgcggtaccggatttgcaaaacctcttttacaacgtgctttgaatctcctaaataacaatggtaaagcagggtggccagatttatcagtagatgggatatatggtccggcaactcttaatgcactcaaaacttatttggtcaaacgcgggaaagaaggagaaaaagttttagttcgagttctgaatattatgcaaggtcagcgttacattgaaatctgtgagcgcaatccaagccaagaacaatttttctatggctggattgctaatcgagtatcaatgtgaagtacctaattttactgtgcattctactcaagactgcacagttacttcgacgtatagtgaggtagttgtaaaagtttataggtaagttataggattgattggtaataatctttaaattttagggggggattgttcagatgtagtgtattctgtaaaataaaacttaattatattttgctttcaatacaatgaacgatcaagttttccaattacaaattgttataaatggaggtttaacccccattcaatctaagccagaaacacttgataaattagtaaaagaatttgctataaatcatttgttgtttccaaaagaaataactgaacaattaattgagattaattctcaggatggttctcaaacaaaaaagataactaaatttattgatttggttagtagcaatcaaaaatgtacctaccaaattagaaatgattcacttgtatttttaaattcctttgagaaaatagaggaattagaaagtatatttgaaaagttttttaaatcgttttcggatctgaccccatatataaactataaacaatcaaaaagattggggctagttcttattagggaggattataatgaggttacattacgcgagtattgtacttcagaagaattagatcgaaatgttattgagaatagatcgagaaaagttactcgttttgctatggcggaactaaatgaaatggtaaatttatctgtttcaaaagattatgtaactcatgaatcaggagtttctcgaaatactctagcaagtgtttatgatgttaatacgttatctactaaggatgtttttagatttacaagtaaggatgtagtaaagtttataaatgcttcaaagaaatttattttagaatcaatgtaagattttttatatgaactattcaaataatttatctaataatactatgtatgaaagtggtaatcataaaaagataatcactaagtacgagattgaaacaataaaaacggtttggcaaaccgataagatacagtcttttttaaaagattacttaaatacagacgtagttagtattactgaccccactgttatagaacaaaagataggggaagagagcttaaagcaaattaaaagagaatttgatatttttaagaataaatttgataattttctgagatatgaagatgtgccagtcgattatgtttcacctattgaaaatgaattaatcaacttttataaacatagtaaagttgaagttcaagaacaaattagccaatggattattgattcttttgataacacaaaggttcttcttaatattttaaaaattttaggtaatattgctcctgattttattgatcatcaatttttaactaattttcttatcgttcttaatcataaagatactgaaatcaaagaatatgcattaagaattcaagagaaattaatgcttccatcatataataatgtactgaagcactctaagttaactccaaaatggattgatgactatagaaaagaattggttgaattgtatgaagaagataataaaggtagttaatttaatatgactatttttgtaagaaagataagtaaagcaaaatggccttctgaagaggaaattgcagaaaaagcactggattcagaaattataccttttgtcagagccgatgccttaactacttgtttaaaaacttctcaaaatactttatctgtttgggcagttgaaaattgtactgatgctgaaatagagaaagctattcttgctttgattaccaatacgaaattagaaagacttaatcgaattcaaattgtttatttttcaaaagaagatgtagatagtttagggttgccgattgcagtaacggaaggagatacaattattgaatctttgtctaaattacataatgatttagttgatttaaattatgaaaaattgggaaaagtatctcaattgattatttcttccttacgatctgaaagtgtcagaacttataatgaaagaaaattaaaagatatgcttttaaaggctattaatgaaggtatagttgaccaaaaattattacatccttcactacaatctaaattaggtttgccagttttagatcaaaatggtaatgcacttattaaacaggaaaacggcgaatttgtaaaagtttaattttttattttatagttaataattcatcccacttaaaaggattcctgctaagtttatctctactcatcgaccagttccgaccaggaacaaaacatggtccgacacctaattttttctttccaaacttactatggataccatccatagcctgcattaaacattcctttttctctatttgtttaaagtcagttaataggtcataatgatatacgctgaattatcaggagactttcccttgggagattctaggcagccaacttataaaagtcttcggccatttgatttggtgtcttaaaacccaaacccttttgaattcttcgatgattataaaataattcaatgtattttataatatctgctttggcttcttctctggtttgatagttgtaatgatgcactaactcatttttcagtattccccaaaagctttcaatcggtgcattatcgtaacagtctccgcgcttgctcattgaaccttgaaaaccatattgctcaagtatatttcgatattcatggctgcaatattgacttcctctgtctgaatgcacaatcagttctttggttggtttttgattgtgaatagccatatttagcgcattacaaacaagctgtgttgtcatgcgctcatttaagctatagccaaccacttgcttcgtgtaaaggtcttttaccgctgctaagtacagccatccttcaacagtccatatgtacgtaatatcacttgaccatgcttgatttggtctagtcattgagaattgttgctccagcaggttttcatagatcgctcgattatggtcactattcgtagtccttttaaaacgcttgtgtcgcttacaatacaggtggttcagcgcttttatctgacgtacagcgtacatactcatttttatgccctgagcttgtaagtatttggttaatcgaatataaccatagctctgctttgtctcctcatgggctattttcaccaatatcgtctgttgatttcgttgaatcgttcttttgctcacgcctctcttgagccaatcataaaaacatgaaactgaaacatgaagtaatcgagccattaaggtaattggaaaagaatatcttttttgtttcatataggcgtaccttactgactttctttggcaaagtacgctgctgccttttttaaaaattcacgttccatttcagctattttgagctgttgtttgagttttttattttcttcgagtagagcgtttagatcaggtgaatactgttttgtacctgctaaagttccagcctttgctttggtattccaatttgaaagagtttgcattgaaatgctaagttgtctggctgtttccgagacattgccttgattggcttcaattaatttgatggcttcagctttaaattctgtggtgtaagtcttgtgtttcttgctcatggtaaactcctgatgagtgtgtttagtttaccaagttaaaacctcctgttttttcagcacacatcataagtatgtccatactttggctctaaacaggtcagcactacaccgcacttcttatatttaattccttctttgtcgatacggcttaccatatttaatagtatgctcaatgtagaagtaaacccaatctttcataagttcttcactcattcttaataaaaaacaactatcaactaagaatcgataataattcatttataaactattcaaaatgatagaattactcaggtttgaaagttggatatgttttgcttaaaaagcatgcagtctacaaatttttttaaattaattgaaaattaaatttgtagactgatttgtagactgttgaattgcaaaatacagcattgtggtacaagcggatgcaactttaattatgattaactatttgaaaatgcaagataaagcaaccgaatgcaaccattaacaattacagctagactgtcaggattctacttcctttattattccattgttggcacatttatgccgtattggaacttatatctccaagatcagggatttaattatcaagagataggtattttatcttctattgctattgtgacgcgcttctttgcccctttagtttggggctggatcgccgataaatccagtaaaagaatgctattagtgcggattgccacatggatggaggcatgtatatggttggctatttttataattcctaatacttttcagtcagttgctttattgatgcttatttttagtttttttcaaaatgctattttagctcaatttgaaggagtaactttattttggttaggagaccaaagggcgaaactttatggcaagattcgaaaatggggatcagttgggtttattgtaggtgtatttacaataggggcaattttagaaatcattccgatttcaatgttgcctatattattgcttatcattgcctcattagcatttatttgggcatttacgatacgtgaaccagaaggggccccaacttcacaaaagcatttagaacctttattgcctgtgctgaaacgtcctgaagttgctgcttttttcacaattgagtttattcttcttttttcacatgcacctttttatagcttctatagcaattttctgaaatcgttaaattttagtacaacggaaattggttttttatgggctatgggcgtggtttctgaaattgtgatgtttgcatatgcaactacgttttttaaatatttttcttggcgtagccttgtagcagtatgtttgattttgacaagtatacgctggttattagttgctattttctctcactatttcataggtcagttatttgcacagtgcctacacgcttttagttttggcttatttcatctcatcgcaatgaggcttatctttcaaaacttttcaatagggcaacaaggtcgaggtcaggctttttatagcaccatgtgggggcttggagtggcgtttgggagcattttggctggtcattactggaaaattcttacgggcgagcatatttttatgatcgctgctttagtggttctatttggtatgtgctttgtctattggttacctaaacaaatcgaaaagtcagtttcttagattaaatagtgataaaaattgttaggaatacagagttaaagatagaaattgtttgatgagaagtatcggttcgttacggttgaaaaatattgtttttatatggttatgaaacaatgtttttctaaaaaaatgtgctaacttaaacccatgcgtttaatgattaataaatctatgaaaaatatttatattatgggattattattggcttgttctggttttgctatggctgagacagtgactcaacagccaacagaacaacctgttcgcactgcaagtaatcctaatgctatacgtattgttacgcgtcctgaaattatgggattatggggaatggagattccaaataataaaaaatgtgtagagtattataatttccgcagtagtaacgatgtggtgattaaaagtggtgaagagtggtcatacggtatttatgaatatcagccatctgatgaccctaaagagcagctatcggctttagtaatgcaaattaagtttgataataataaagtagattgttctggtcagaagcaagatcagacaggtgatatttctcaatatttcgtgcaatggaaaaatgaccatactattaatttctgctcaacggctaagggtgagcaatgtttcgcaactttacgccgaatgttgccataaacaagtagatataaaaaagcctcttatttaagaggcttttttatatgaagcagattaagcagtttcagctttcttttcttcttccacttgctttaacaagtgtttttcaaggtaatggatgtccattgcttgagaacagaagtttttatcctgcaaaataagatctttatgtaaaggaatattggttttaattcctgtaagaatcatttcatctaacgcttgacgcatgcgggcaagtgaagtttcacgatctttaccatgagcaatcaattttgcaatcattgaatcgtaatatggcggaatgctatatccaggatagatatgagaatctaaacgaatacccgcaccacctggtgcatagaaactttcaattttacctggtgaaggtaagaatgttgttggatcttcggcattgatacgacattcaatggcatgaccacgaacttcaatatcttcttgttgaagctctaagcctaaaccagctgcaatacgtaattgctgttcaataatgtcaaccccagttaccatttcagttacagggtgctcaacctgaacacgagtattcatttcaatgaagaagaattcaccatcttcaaataagaattcaaacgtaccagcaccacgatattgcattaactgacatgcgtgtacacaggcttgtaaaatatcagcacgtgcttgttccggtagatttggagcaggagcttcttctaacactttttggtgacgacgttgtaatgaacagtcacggtcatataaatgaatcgcgtggccattaccatcacccaaaacttgaacttcgacatggcgaggtttttgtaagaagcgttccatatacacggtatcatcgccgaaccacatttctgcatcacgttgagccgcttgaactgactcaagtagtgtgtctacacgttcaacaatacgcataccacggccaccaccaccagctgccgctttaacaataagcgggaaaccgatttctttcgcttcagctaatgcgttatggatagttacagcatggtcgcagccaggtaccgtaggtacgccagcttttttcattgcaacaattgcagaaaccttgttacccattaaacgaatatgttctgggcgagggccaataaatgtgaaacctgagctttctacaatttcagcaaactcggcattttccgaaaggaagccataacctggatgaattgcatcggcaccagtaatttctgcagcagtaataattgccgggatgtttaaatagctgtcactacttgcacccggaccaatacatactgcttcatcaacgaaacgtaaatgcatcaaatctttatcggcatctgaatagataccaacagttttgattcctaatgttttgcaagcccgggtaattcgtaaagcgatttcaccacggtttgcaattaaaactttttgcaacatagatgtccccggggtattacgcgcgataacggaataaaggttgaccgaattggatcacttcaccatttttcactaaaatttcttcaatcacaccgctttgagttgcttcaatcgggttcatgattttcattgcttcaataatacccaaagtctcaccagcagatactgtttgacctactttaacaaatggtgcttcgcctgggcttggagcagcatagaacacaccaaccataggagaagtttcaactgctccacgtggtgtttttgcaacaggtgcttcagcaacaggagctgccggaagtgctacaccagccgcagcaacgacaggattgcgacgagttaaagcgatcgattgatcaccttctttaacttcaatcgcttgcaagtcagactcaatcattaaatcgatgagtttcttaattttgcggatatccatgggcgactattcctgaactagtttgggttagatggttgaattttttcaatagcgtaatcgagagcaaagctataaccttttgcacctagaccacaaatcacgccaattgctttgtctgataaataagagtgatgtctgaaagcttcacgtgcgtgaacatttgataaatgtacttcaataaagggaatggcaacgccaagtaaggcatcgcgtaaagcaactgaagtgtgagtgagggcagcagggttaataataattagttttacgccttctgtttgtgcctgatgaatacggtcaacaatggcaccttcccagttgctttgaaaagtatctagtgtaattgaggcttgttcagcttgagcaataagttgttggttgatattgtctagggtaagatgaccatatacttctggttcgcgttttcccagcaaattcaaattcggtccatgaattaccaaaatggtcgaactcattcagattgctccagctctaaagttgcaaataatctttgcaagatgtctgcaaagtttgcttattatggcatatgtttctacaagttttttataatttcttttaattgtcgcagaaagggtacaccaaattcggcttatatattgtaaattttgcgacgaattagcaatgttaaaaaatgacaaaatttcaagtaatttaacggagcttattttaaaccgaattgacaaaaacagttcatgtattttgtgtaacgggggtataagcatcttcaatcgttaacatttcattccagcgagttaggtaattttttgagcgatgacattgtttcatttgccaagatggattacgtgagtgatatccaacttgtaaatagtggctaccaaagcgcttacggactgtacctaaagtttccatcaattgttgtctttgatgaataagttccagaggctgccataaatcatcaatatgttgctgacgtgcgtgtagagcacaaaataatactccaatttttatgtaacttttattttctttatataaaacatcaatttgctgcatagctgctttagtaagtatgcataaatcatctgttgcataatgaagaccaattgcttgagatgtggcttttttatagggcggtttgtcggttttttcataaagcataacttgaacacaggcacaaagttgttcttgtttcattaaacggcgatgtgcccggttaaggtgaaagataagtgcttgtttaataatctcaatactggataaagcttgagcaaaacttcgtgatgctaaaatccgtttcgttggaatagctggatcatcaagttgaatacaggattggccttttagctcacgaatggtgcgtgccatgaccacagaaaatgcctttgccatatggtgttcattggcaaaagttaagtctaggcatgtgtacacctcataactttgtagctgtttgactaattgatagccgattccccatacctctttgactgatgtctgttgcatgaggtcttccataattaatggatctaaggtgatgaaattacatactcctttaaaacttttaattttcttagcatagtgattggcaagttttgcttgtgtctttgaatatccaattccaatgcaacaaggtaagcctaaccattttaggagagtgcttctcactttattgcagtagtcagagatatcgatagattggaggtaaggggtgagatgaataaagcattcatctatagagtaggcttctaaatcatctggagagaaaaactcaccgagaacagcaaaaaaacggcgggacatctcggcatataaagtgtagttgcttgaatagacttgaacgcctgcttgtaaagcatctttttcaatttggaaccaaggtactcccatttttattcctaaaagttttgcctcttcactacgtgagaccacacatccatcgttattagataaaacaactacaggtttatcattgagtttagggttgaaaagacgctcacagctgacatagcaattattaatatcaaccagtgcataaacttcacggtgtgagatatctttcatgatttcattcccttactcattaattgaaatctgcattttgaatttgtaacataatcaagttaacaaaattacagactgatatctaggggagtttcggttgttcgtcgaaattataggtaggagataaagtctatgaaatgtcagttattgatatggaaatgactgaaaatgataagttttaattggttatgatcggaaacataagagctatatttaatggatgagttgagtcttttaaatgtagtaatgcgtataacgcatttgtcttatgggtctttcaagctgtctttgttaataaagacagcttttttttataatgtgcttaagtattttttagagtttggcttgattgtagcaatcgagattaatgcattgtgcactcagttctatgatttgatcaggggctaattgaagtttttcccatttttgcatttgctgaaataaccaatggaaatcttcaggttggggagccgcattttctttaaccaagtactttacaatattttgaatcatataatatttatcgacatgtacttcttcagagcagtgaaatcggacaatcccaaactcgaccaataactttaagataggtgcaaaatcttttaaattactcaattctttttgagctttcataattgccgttgtaagggcaactaaggtttgaggatgttgttcagcccattcttgagttactgcgagaactttatctgccacattgggaataatgtcttgacttgagcagacgattttacttaaacctaaaagttcaccttgagtattccaaggctctcccacacaaaaaccatcaatcacatggttatctaaagcttcgaccatatacggtggcggaagtgctttgagtttgagcgtttgagctattctagagtctgccaaggcaagccattctcttaaacaataatgatggattgaatgtttaaatacatgggctagagaaagagtatgatcttgttcaatgtattgaataactttttgggcggtagtttgtgcattatcgctttcttgaatagccagttgataaattaatttttggcttaagctgataaaagcacggtttttacttaaaacgagcggggtttgcagtgcaataccaatttggtctgcacccattgctgctgcagggagcatcgcagataaacaatgtgcagcatctaataaaccaaaagctaaacggtcgcgtagacttgcccatgatgcttctttgactaaggtaacatctaaatcgacttcttcgaagaaaccttgctgctttgcccaaagtaaagcgatgcaatcaagtaaaggaatatagccgagttgcaattgagtcttttctaatttgctcatttattcatcctttagttgatcatttagtaatttttgagcgtcaagtaaacgccgtgccatttctccaatcgttatacggtgactcatggcattttttctgagtaattgaaaagctgtgtcttcaggtaagccatgcagttgcatgagtagcactttggccttttcaacatctttacggtctgccagtttggtttgagcttcttttaagtcaccttcgagctttttatgttttttatattgctcaattgaaatctctaaaatggtatgtaagcgggtggggtctatgccatctacaatataagccgttacgcctgcatctatagcttgtttgatggtgtctttatctgaatttttagtgaatagaacagttggtaggtcatagctactcacacaactttcaataatgtcacgatggggatgatccatatcgagcaagatgacatcggcttgtaaatcttcaagacgaaaaatatttaagtggtccaaagtaaggcaggcaaccacttcaaagtcattttcaagcagactattttttatatagtcggcccgcgcatgatcatcatcgataagagctattttgagttttggcataagttcagaaaatcaggctaagaaaatgcgccaattcgacgcgttttttgttattaagttttaagcaagattagtgccatccaaaattaaacaaaaaatcaggcatgagtggtcctttactatgccaaagtattgttttgaccaatattggtgcaaaaaagcgattcattttgtggcaagacttatttttgtttaaaccatatagacgagctgcaatagtgcagggaaaattaaatattctttttggataaaaatgggttttatattaagtggttgaaaataaaaataaaaaattattaatattaattttaaaaagaattggcatgcaaaatgcttagttaattacaggtcgaagacgaccataagttttaaagacggccaacgatgtccgttctgatcgaatttgtgagtgcaactgtacacacagaaaatttacgttcagtcggagtgaaggttatgtctttatttttattgcataaaaaagttacatctgaattaactaatttttcagtttcagcgatgcgagccttccgtatgagggggctcgctttttttatttgtttttatgactttgctatgcattgggtgtcgtcaacgagtggaaaaaatgggttccaagcagctatacgctttgtgatgttgatacgtttctcggtagagcacaaggcaaaacaacaatgtctatttgagaacgcaagaacgcagcttaaaagcaacgtgatttgaggagaaacactatgaaattggtaatgattggtcatggtatggtgggccacaaattcatcgaagccattttagaaaaagcagatgatgaactggaaatcacgattcttgcagaagaacctcgtatcgcatatgaccgcgtgcatttgactgaatacttctcagggaaatcggcaaaagatttatctttagcacgctttgattttgccgatgcgtatggcattgacctgcgtttaaatactaaagcagaggcgattgatacagctgcacaaaccgtaacaaccaatcatggtgatgtgattagctatgacaagttggtgctggcgactggttcatatgcatttgttccgccaattccgggtaatgaccgcgagaactgttttgtttaccgtaccattgaagatctagatgccattcgtgcagcaagtttaaaggctaaaacaggcgtagtaattggcggtggtttacttggacttgaggcagccaaagcattacgtgatttagatttagaaacacacgttgttgagtttgcaccacgtttaatggcagttcaaattgatgatttagggggcaaggttttacgccgtaaaattgaagatttaggtgtaaaagtccatacacaaaaagcgactcagtctattgagtctggtgtaaataccactcatgtgatgaagtttgccgacggtagtgaactcgaaactgatgtgattttattctctgcggggatccgcccacgggatgaattagcgcgtaatagcggacttgcgattggtgagcgtggcggtattgtaattaatgattattgccaaacatcagatcaaaacatttatgccattggtgaatgtgcgctttggcaaaataaaatttatggcttggttgcaccgggctatgacatggcgcgtattgcagcaaaacacattttagatgaagagtgtcattgcttcgctggcgcagacatgagcaccaagttgaagttgatgggcgttgatgttgcttctgttggtgatgcacatgctatgaccccaggtgcattaagctatttctatgcagatgaacatgcactggtttataaaaagattgttgtaaatgccgacaaaaccaaattgcttggcgcggttttagtgggtgatgccaaagaatacaacgaccttttacaaatgatgttgaatggtctggctttaccggaagtgcctgaaagtttaatcatgccgggttttgagcaatcagcagcaaaatctggtggtagcggagtcgatttactgccagacagcgcaacaatctgctcatgtaataacgtatcaaaagcagacatctgccaagcaattagtgatggttcgacctctttaggtgcattaaagaaatgcaccaaagcagcaacagcatgtggtggttgtgcaccattagtaactcaagtattgaagtcagagttacaacgtcaaggtgtgactgttaacaatcacatttgcgaacatttcccgtactcgcgtcaagagttgtatcacttggttcgtgtcaatgaaatcaagacatttgatgatttaattcatcaacatggtcatggtttaggttgtgatatttgtaaaccggcagcagcaaatattctggcatcttgctggaatgatttcgtacttaagccaagtcatgcaggtctgcaagacagtaacgactactacctaggtaacattcaaaaagatggctcttactccattgtaccgcgtatggcaggcggggaagtcactccggatggcttaattgcgattggccaaattgcgaagaaatataacttgtacaccaaaattactggtggtcaacgtgttgatatgtttggtgcgcaagttcatgagcttccatttatttgggaagagttaaatgctgcgggcttcgagtctggtcatgcctatggtaagtcgttacgtacagtgaaatcttgtgtaggtagcacttggtgccgttacggggtagataactcggttggtttggcgattgaacttgaaaaccgctacaaaggtttgcgttcaccacataaattgaaaatggcagtgtctggctgtacacgtgagtgtgcggaagcgcaaggtaaagatgtaggcgtgattgccactgaaaagggttggaacctttatgtatgtggtaacggtggtatgaaaccgcgtcatgcagaattacttgcatctgacctcgataaagaaacacttattcgttatatcgaccgtttctttatgttctacattcaaacggcagaccgtttacaacgtaccagtgtatggcgtgacaacatggaaggcggtctagactaccttaaatctgtgatcgttgatgactctcttggtttagcggccgagcttgagcgccgtatggaacacattattggtacatatcaagacgagtggcgtacagctgtcgaaaacccagaagttcgtaaacgcttccagacttatatcaatgcaggagcaaatgaacaagctgatccgcacattcaatttacaactgaacgtggtcaaatccgcccattaactgaagctgaacgttcagaagaccgtattccaatggttgaagcataaaggagagtttctatgaatattgtacaagacaaaaatatgcttcctgatgatcaatggattgacgtttgtgcactcgatgatttaaccccaaacacgggtgcgggagcgctagtgggcggccaagcggttgcaatcttccgtgtggggcatgaaaaacgtgtttatgtactgagcaataaagatccgtttagccaagcgaatgtgatgagccgcgggattattggtgatttacaaggcgaacgcgtcgttgcatcaccaatttataaacaacatttcagtttagctacgggccgttgtttagaagataaagaccaaaaattggcggtttatccgagcaaaattgttgatggtcgtgtttgggtcaatgcggtgccgcaaaaaacttatattaccaatacaggtgtatcacaagacaaacttagactggtgctgatcgggaatggtttggcagggatgcgttgtctggaagatttgcttgatatggcaccagaccgttatgaagttacggtgattggtgaagaaccatggggtaactataaccgtattatgttgtctccggttttatcgggtgagaaaaccattgaagacattatgttgcatccaccgaagtggtacgacgataaaggcattaaatttattgctggtgataaagccgtaaaaattgatcgtccgcgtaaagtggtttacaccgaaaaaggccagacagttgattatgaccgtttgattctggcaacaggctcggcaccatttattccaccagttcaaggtgttgacctaaaaggggtgttaactttccgtgatatttatgacgttaacaccatgattgaatactgtggttcaaaaactaatgcagtcgtgattggtggcggtttgctgggtttagaagctgcctatggattaaagcaacgtggtatgaatgtcacagttctacatttgatggaccgtattatggaacgtcaacttgatgggcgtgcgagtcaattacttcgtcatagcattgagcaaaaaggcattcaaatcattaccgaagccaatacagaagcgttaattggtgatgaaaacggtcatgtcaaacaaatccgtttgaaagatggcacagtgttagatgcggaccttgtggtgtttgctgtaggtatccgtccgaatattgctttggcgcaaagtgcaggattacgttgtaaccgtggtgtattggtgaatgacaccatgcaaacatttgacccaagtatttatgccgtgggtgagtgtatcgaacaccgtggtcaaacttttggtttggttgaaccactgtggggccaagcttttatttgcgcgacccatttagcagagcacggcagcttaacttttaaagcaccaactgtgccgactcagttaaaggtgagtggagtcgatgtattctctgcgggcaattttgaaccgaaagatgattatgaagacattattctgaacgatgaaaaacgccagatttataaacgcattatcattcaaaacgatcgggtaatcggtgcagtattgttcggtgatactgaagatggcatgtggtatgcagagttaattgcagatcaaactcctgtttcttcatttagaaataagctgctatttggtcgagattttgcattaaaaaatgcaggctaaatagggaaaggagcagttatgaatagtattccaagcgttgaaatcgatagctccgaccatgttgcaaaaatcactaaaacaacatgtccatattgcggtgtaggttgtggtgttagtgtaaacgttcaacaaaaacctcaaggacctgtggtgcaagttgagggggatgctgagcacccttccaactttgggcgcttatgtattaaaggtagccgacttgcggatactttggggttagaaacacgtttacttcaaccgatgtttggtcgtaagccacttcggactgtaaccacatgggatgcagcaatcaataaaattgccgataaattccagtcttgtatcgacaaatatggtcgtgacagcattgcattttatgtttcaggtcagcttttgactgaagactattatgtggtgaacaagtttgtaaaaggctatttgggcactgcaaatatcgataccaactcacgcctttgcatgtcatctgcagtggcaggtcacaaacgtagtttcggtgaagatattgtgcctgcaagttatgaagattttgaacatgcagatatggtggttttggttggttccaataccgcatggtgccatcctgtgctgtatcagcggattatgcaggctaaaagccacaatccagatatgtttgttgtggtgattgacccacgttttaccagtacttgtgagcaagcggatttacatttaccgattttaccgggccaagatgtcgcattgtttaatggtctattccaatatttatatcaaaatggtcatgccgatcaggtttttgtggatgcctatactgaaggtttgcaagaggttttggcaagtagtcagcaagaaacggatattgcctatgttgccaaacgcagtggtatttctttagacaaattacagcagttctttgagaagtttgcgcagactgaaaaggtaatcacgctattttcaatgggtgtgaatcaatcaagtcagggtgtgaataaggccaacagcattattaactgtcatttattaacaggcaaaattggaaagctcggcgctgcaccattttcaatgacaggccagcccaatgctatgggtggtcgagaagtgagtggcttagctaatatgttggctgcccatatggatttagataatcccttgcaccaaaaagtagtgcaaaccttttgggacagcccatttattgcaactcaagctggcttaaaagctgttgatttgttccatgctgttgaagctgggaaaattaaagccatctggattatggcaaccaatccagtggtaagtttaccagatgccgatcaggtgaaacgtgctttagagaaatgcgaattggtcgttgtgtcagatatctgtgtcgataccgatactacggcttacgccgatattttgcttccagctttaggttggggtgaaaaagatggaaccgttactaactctgagcgtcgtatttcacgtcaacgtgcttttttacctgcgccgggtgaagcaaaagcggattggtgggcaatgagtcaagttgcgaaaaaattaggctttaaaggttttgactttaataatgctgttgatatcttcaatgaacatgctgctttgtcagcacaagataatgcggacattgaagcacgtgagcaaactgatacgttccgttatttcaacttaaaaggtttaatgaacctaagtactgctgagtatgacgctctacaaccagtgcaatggccagtatgggataaaaaacaagacgctaaagccgttcaccaactgttttgcaagggccagtttagccataaaaatgctaaggcaaaactaattccgactgttgctattaatccggtacatgcaatttcagaagattatccgctcattttaaatacggggcgtattcgtgatcaatggcataccatgacccgtactggtttgtcgccaaatttaaccagtcaccgtgctgaaccattctgtgagattcatccaagtgatgcattaaagtttggtgtacgtgatcaaggcctggtagaagttcgttcgaaatggggcagttgtgtactgcgcgtgacattctcatcaggtgtccgtcgtgggcaaatttttgcaccgattcactggactgaacaggtcgcatccgacgcgcgtattggtaaagtcgttaatccggaagttgatgcaatttcaggtgagcccgagttcaaacatacgcctgtaactattcagccgttctataccacttggcaaggtgtgctctatattcgtgaaggatacgattcgcatattcaagaatcgctacatcactgtgcatggtggactaaagttaaaatggtgaaaaccaatcgctatgaacttgcagaccgccaaacttttcatgatactcaaaagaatctgaaaagctttttgccatttgccgatgaaacctttgaatggttaagcatagaagatatttcttcacaactgagccatagtattattttgaaagatggcattgtaattgcaagtctatatattgcaccgccagatttattgccagaccgtgactgggtagcaagtctgtttaaacgagaacgtttgagcgccttgcaccgtaaagctttactagcaggtatgccaatgtcggctaccaataatgatgggcctttggtgtgtagttgttttaaagtaggtaagaataaaattatcgaagcaataaaaacacaaaacattacccatgaaaaacaggtcactgcttgtttaaaagctggtggcaattgtggatcatgtttacctgaaatccgtggcttaattaaagcttgccagcaagaggtagaagtgtgaataagggatatcccataactgatctggtcattctggcgggtggacaagcccgccgtatgaatggtttaaataagctgttgcagcaattcgatggcgatacgcaacttcttaagattcaccaaaagctaaaatcttcagtatctgaaatttgggtaaatagtcatcgagactattcaatctatcaaagtattgtgcctgatattaaatgttttcaagatgatgcttccggttttttcggcccgcttatggggatgaaaagtgcatggtctcatgtacgagcagattatgttttgtttattccttgtgatgtgacctacatacctacgcaagtcgttgcgaaattacacagcgcacttcgcaaaaataaacaggctcaggctgcttacgtttcaattaacggagatgctttatacccattttgtttgttaaaacgtgaaagtctagaagttttagagcagcaaattgataagcaacaattgagtttaaaaaattgctttaaacttttacatgcacaagtagccatttttcaaaagcagaacttatttttccatagcattaattctttagatgaacttcaacaatacaaacaaattaaagcatttaaagagattttttcgacaaattagaacttcaatcatatcgatttaaaatttacattgataatctgaaatcattttttaaattttgagttattgactgtttagaatttaagttctattttggaacttgttattttcattctagcagatgtataaaaataaacggagccagaaaaatgatggatgcagctcagcaaagtaaaacagatgtgaccgcatgtattttatgttcaagaaactgcggtttgagcgtagaaattaaagataaccaatttgtcaaaattaaaggtaatcctgagcatccattttctcaaggttacatttgccaaaaagccgcaagattacagcattaccagaaacatgcagaccgtttgaccgcacctttaaaacgccaaccagatggttcatttaaagaaattagttgggatgtagcgatacaagaaattgccgatcaattggttcagattagagataaatttggcggtactgcttttgcttcggttgggggcggtggacagggtaaccacctcggtgcagcttatggccgacaacttttattggctatgaaaagttattatgcatataactcacttgcccaagaaaaaacaggtgatttctggctcaatggacgtttattcggtagtcaggcttgccatactacagaagatgttgaacatgcagattacgtactttttattggaacgaacccgtttcaggcacatggtattcccaacgcacgagacacgctaaaacatattaagaaagatccgaaccgaaccatggtggtgttcgacccgcgtgttaccgaaacggcaaaacaagcagacattcacgtgcagctaaaaccgggaactgatgcttttttaatgtcggccatgattgcgatcattattaaagaaaagctttatgatgcagcgtttattgagcagcatacacatgggtttgaagaagtaaaagctgcatttaaccatgtcccgattgaagactatattgctaaagctgatgtacctgtcgatttgatttatcacgttgttcgagatttttcaaaggcaaaaagaggctgtgtacgtatcgatttaggtattcaacatactttgaatacaacattaaatggttatttagaaaagcttttatacttgctgacagggaactttggaaaacagggtaccaataatttgcataccatgtttattccaattttgaccgatacggatgaaagaaaaccaaaatatcgacgtagcgtttatcataaaatgttcccgatttccgggtttttcccgcctaatattttacccgatgaaatcctaaaagcaggggaaaagcgaattcgtgctgtgtttgtagatagttgtaatccactattaacctatcctgatacaccagcttttgaggaagcatttaaagccttagatttgttggtggtagttgatgttgcgatgacagaaaccgcgagactcgccgactatattttgcctgctcatactcagtttgaaaaatgggaatttactggttttaacttggaatttcctaagaatggttttcacctgcgtcatcccgtattggctgctcaagcaaacactttaccggaagccgaaatttatactcgattactggaagctatgaatgctattccgaagagtttcccagttttagaaaaaatagctgcggtcgactcgaaaaaaactgcctacttaccctacttgtcggcgttaggaattaccttggcacgacataaaaaatatatcccttttgctgcctctattatttatcgaactcttggcaaacgacttggcaattcagcagattcagttgcttttttattgccgctatctattcaatatgctgttttacataccaaagcagtacgccgtgcaggttataaaggtaatccattaacacaaggtgtcaaactatttgagcagatattaaagcaacgttcaggtatggttttatcgcaacatgaatatgacgaagtctggaaactggtagcttataaagataagaaaatacgtcttgcaattcccgagatgttaagtgaactcgcaagcttgaaaagccataacgttaatgttgaagagtttcctttcatccttttgtcaggtgaacgccgtagttacaatgccaaccaaatttaccgtgaccctgcttggcgaaaagtagatgcagagggtgcattgcgtattcatcccgaagacgcaagacacttaaatgtagatgcaggagggcagcttaaatgtatctcagcgcatggagaaattcaggtagctattgagttggatgatgggatgagaagaggtgtcgtatcacttccacatggctatggtatgcgatttcaaaatggagaaccgattgggccacaattaaacttacttatttctgctgaacattgtgatccattgtcgaaaacgccataccataaatatgtacccatccgtttagaaaagtgttagaaatagaatcaagtaaaacatagattttaccgcgctaacccgagatttatttttaaattgttctctagacggtgcggtgaaaaacctataaaaagttaaatattatggaagataagtagagctggaacaaattttgcataaaaagcaaagcactatttaggcgcaatttttctatttgattgttcataatcggtgctcgcaatatttgaactgttctcgatatgagtgcaaatgatgaaacaatatcactctgaaactgcgccaagccttctgcaagatcaatatgggcgtatcaagcgtaagttacgaatttctgtaactgatcgctgtaattttaagtgtgtatattgcatgcctgagcatccagaatggttaaataaacaagacttgcttagttttgaagcgctctttcaattttgtcattttatggtgcagcaaggtatccaaagtattcgcattacgggtggtgaaccattaatgcgtcaaggtattgttcatttcattcgagatctacagtctttaaaaagtttaggtttaaaacgtatatcgatgactaccaatggtcattaccttgctaaacatgccaagcagctaaaagacgctggattagatgatttaaacattagtttagatagtttagatcctgttcagtttaaagagttgaccaagaaaaaattggaacctgttttagaggggatacaagctgcaaaagaagtaggattaccttttaaaattaactgcgtgttaatgaaagatagaaatgatgatcaaatcttacctatggtgaaatggtcaattgctcatcatattcctttgcgttttatcgagtttatgccgcttgatggtgatgcactttggtcaaataaagatgtggtaagtgaggctgaaattttacaggtattgcaaccgtattattcggtacaagtcatcgagcagcaacatgagccagcgcgtcaatatctaattaacggtagctaccatttaggaattatttccacaattacacattcattttgccaccaatgtgaccgtatacggcttaccgcaaaaggcgaactatataactgtttatttgcgccagaaggcttaaatattaagcctcagcttcaaacgctggtaagcaaacaacatactccagaatacggtatgtatatccaaaaattaaagaatttggttcatccttatatctggcataaagccaaaggtttccatgccttacaacatcaacaaacccgtaaaatcagcatgcatatgcttgggggataaatgcaacaatctatccaaattaaagtcgaagcatttggtgcaattgaaaaattgcttcctgaaaatcttttgttagtttgtcctagccatagtctagttaaagatgtattagatgaaattgttttattgcatccggaatctacaaaagccatggaaaaatgtgcatgtgcgattagtgataatgtcataaccagacaaactgtcttaagtgagccatgcactttggttttattatcacccgttgccggaggatgagtcatgaaagagttcgcaagaatacaagagcaggctttaagcttggatacttttgatccgattcagtcttttcctgaatgtggcggtatcgatatttttatgggtacggttcgtaatcatcacgaaggtaaagcggtaaaggcgctgaaatatacatcgtataaaccgcttgcagaaaaaatgatacgtgaaattgaactagaaattgagaaaaagtatcaggtatcttatgtgcgagtggttcatcggattggatatttagatgtcggtgaaacagcaatcattgcaattgcttatgcagcccatcgccgtgaagcttttcaagcatgcgaagaagcagttgagcgagtaaagcatgaagtacctgtatttaaagaagagttctttacagatggtacaagtcactatgtagaaggctgctgtattcgtaaggatgcaccgcacgaccacaaacaccatcatcatgccggccatgagcactcacactgaaatatgtaatactaggataaataatgaaaaacgtaggaatgaagccggaaagttatcgtgttgctgaagcacaagcgattttatatgcaccaccgcactgtattgaactattaagacaaggaaacacggaaaaaggtgatgcattaaaaacagcacgtgttgcaggaattttggcagcaaaacgaactgatgagctgattccactatgtcatccgctaccgatttatcgggcagatgtagaatatgaattggaacatgactttgtaaaaattattgctgtcgttgagaccattgggccaactggcgtagaaatggaagctttaacggcggcaagccttgcaggtttaaccatttacgacatgttaaagccccattgtgaaccagaagaactctggatggatcaatgtaaactacttaagaaaaaaggcggaaaatcccattttaaacgggtattgcgtcagcctgtttcggctgcggttattgtattgtcagataccgtagcagcgggtagaaagccggatacggccggaaaatctgtagttgaaactttaactgaagctggatttgatccgatccattaccaaattttgcctgatgaagcagatgatctcaaagaattggtcctagaactcaccaaatcgtatgcttgtattatgaccgtgggtgggacaggaattggtaagcgtgacattacagttgatacgctagagcctcttttagaacgtaaattagatggcttaatggaagctgctcgctcatttggacaaaaacgcacgccatacgctgctatgtcacgcggagtagcagggtttattgaccgttcgttagtagtgacgttaccgggaagccgtggtggagcaagtgaatcaatggctgctattttacctgccttagtccatatttttgatgtttgccgtgatttaccgcatccgggaggctatgaataatgtcaggttgtggtgctgagcatggattaatcagtatagatgaagcgctagatttagttattaataagcctaaaaacttaagctctatacaaaagactctaaaaaatagcctaagtagttatcttgccaaagagatttactctgaaattaatctacctagcttttctcaaagtgcggtagacggttatgcactttgtagccatacagaagatttaaataatcaaaagttccaagtcacaggtgagattcgtgccggaagtgagagtcacgacatactcggtgaaggtcaggcaattcgtatatttacgggcggcaaaattcctgaagggacaacgcatgtagcacggcaagaaatcgtatcggttatttcggctcaagaaatttgtttaacggaatatatacgccctcaagccgatatccgctttaccggagaagaaatccagcaagggcagttacttgctcaagtaggacagtttctaaatattggaagcttggctgctttaagtatggcaggtgtacaagaacttactgtatatcgtagaccaaaagttgcagttttagtcacaggtgatgaagttgctcaaacggcagaagatttaatcgatggaaaagtctttgatgcaaatggtccattactaaaagcttggtttgaagattatggtttagatgttgaactcattcatgtggcagatgaagcagatcaggtcacccattactttaaccagctaaaagacagccatgatgttgttataacgactggcggagtttcggtaggagactacgactttgttcggccctgtgctttcgaagttgggtttgaacaaatcttttggaaagttaaacaaaagccgggtaaacctttattctttgccgaataccataattcacaagctagccattcctgttatttgttaggcttaccgggcaatccggctgcggtatatgtcgcaatgcaagtttacggtaaatctttgcttgatgcattgcagggcaatagacatggaccagaatggtttaccgcaattttagagcatgatttaaaagaagatgcacgtgagcgttttttacgaatgtatgcttattttgatgcaggacaacttagggtgaaaagtttggccaagcagcagtctcatatgctgagtaaccttatgcaagccaattgtttagtccgtattcctgcgagtacaaaactagcatcaggaactgtgctaaagggaatctttatttcaaattaacttataaataagctgtatataattaatccatactgatggattaattatattttataactatttttagtgactgttattttaaaaaataagctttataaatatactaaaaacttatttctaagctgaatattgcatataacatattaagtggtttagggtataaataataaggcaagtaggccagttttatattgaggaaagcataaagatgaaatgggatgacatcggtgatcagccttgttctgttgcccgtatgctatcagtgattggtgatcgatggacgatgctaatattacgtaatgcttttatgggaattcgtcgttttgatgactttcaaaaatcattaggtgtcactcgtcatgtcctttccgatcgcttaaaacggttggttgaatacgaaattttagtgaaagcgccttattttgaccgtcaggaacgctttgaatatcgtctcacggataaaggctttgagctttatccaattatcttatctatggcgaactgggcagataaatggatggaccaaggtttaggtaaacctttggaatatcgtcacaaagcatgtggacataagtttgaacctgttatggtgtgttcagtatgtcgtgaaccattacatgcaaaacaagttcaggtttcggctgggccgggctattttgcttatatggaacaaaagcaaaaacaggcttaaacttgtttctctaatgactcttgtagaagcgcttctgcaagagtcttataaatataatcatgatttgattgtgtaatattaaaacggataaattgacctgccgattgtgcttggctaaaggcattacccggggcgagaatcacttgccgattcaggcaaaaacgggcaatcttcgctgcatctacaccttccggtagacgacaccacacaaaaattccggccttgggctcaatccacggttctatcccaatcgatttaagcttcgcgattgtttcttgcatggcttgagctaaacgaacttttaataaatctagatgcttacggtatgaaccatcggttaaagctgtgtgtaaaatcttggctgagagtccattgtgagaaaagctggtggctatttttaaatcggtaatttgatcaatccattctggtttcgcaataatatagccgcagcgaatagaagcagagagcgttttagagaaacttccaataaaaatcacgcgtgaaaggttgtctagggctgcaagtcgtggagcgggagtatattcaaaatctgagaagatatcgtcttcaatcacaattaaattagactgatcaatcaactttaataattgatgagctgtcgagagtgagagtgttgcaccagttgggttgtgtattccggaatttgtaatataaagccgagggttatagctctcgatagcttctttaaatgcctctaagtccgggccatttggagtgtagggaataccaacaactttaacttgatgaactttaagtagagcatgaaagttaaagtagcaagggtcatcaattaggactacatcatctggtttaagtaaaaaacgacaaaccagatcaatagcttgagtgcctgaatcggttagaagaacttgattaaggtttgcctctatacctttactttgtgcccgtctagccagtagatctcttaatgcgggcagccctaacggtgaagaataacccaataaactatcgtcttcgctacgtgtggctgatcttaatgctttgcggatactttcaagtggcatccaatcatttggtaaccaaccacaaccgggtttaaacgcattaggttctgcttctaaagactggcgtgaaatccataacggatctatagagcgatctaatttgggtcctaattcacttaaggctaaaggtgcaagtggtgccacgacataaaagccggaaccactacgtgattcaattttacctagggcaattaatcgctcataagcttcgacaatagtagaaacagaaaaacctaaatctttggctagtttacgtacagagggaagtcgggttcctggagttaaagagcgattcttaatttgttgttcaatctgtgaaataacaagttcgatttttgttttggtctggttcacactatttatctctaactgtactgtttgcttatacataacagttttttaaaattgtactgctttgtatctggttttgacaccatatcacagcttaaattcttcgtatagttgcggagaataatatgcaaaagtttatgaacggttgggtgaatggttttattggggttgcaatttttgctggttcattaccggctacccgtgttgcggtaacaggttttgagcctggttttctaacagcagcaagagctgtcattgcaggagttttgggtttaattcttatctttttgcttaaggaaaaaaagcctgctaaacaagattggtggccactcgctattgtggctttaggcgttgtagttggttttcccttatttactgcgcttgctctacagtatatgaacgcagcccactcgattgtctttgttagccttctaccgctcgctactgccatatttgcagtagtgagaggtggagaaaaaccaaatttatttttttggatatttgcaattttaggcagtctggttgtttttacctatatgtttttcttatcgggtgaagcttcttttggcatcggcgatttatacatgcttattgcaattattttgtgtggatttggctatgcagaaggcggagtactttcgaaaaaaataggtggatggcaggtgatttgttgggcacttattttagctttgccgattatgctgcttgctactcttttttatatgcccgtttcctttcaagatgtatctacatcagcggtagcaggactggtttacgtatctttatttagtatgctcatcgggttctttttttggtacaaaggacttgcacaaggcggtattgctgcaattagccagctacagcttttgcagcctttaatgggacttgcgattgccgcacttttattacatgaacacgtaagttggtcgatgttaatggtaacggcagtaacaattttatgtgtcgctgccgctaaaaaattcgcataaaaatttataaacaatttgccggtttaggaatacctgccaagcgactgagatggcgagcaactaaaccggtattaaatttttgctgtaaaacagcattattaatatctgggcttacggttttcattaaaaacttaatcaaaggacgtgttgcaggagaatgcccaaattgctgataaaattggcgaaccgcagctaaaacttcaaaatgccaatctgttaattcaagatcgagagatttggcgagttcctgtgctacttcgggattccaaatcgtatagtcgactaaatgaccatcttgatctaattctaaattcataaaaatgagcctaactatattatttcaaagaaatgcaacgattaaattgtaaaaccagatccgcaaactgatcatagttcaataccttaacctgagccaaggtttctgcatcaattaaatctttttcatgagacaaacaagaaactgagccaaactgctgacaaatatttaccgaaagttgagcagttgagtcacccataaaaacaatttgatcatctttatgaaatagctttgcaagttcttcaataatacgaggagtatggtgataagaagcttgcacaagataaagagttgattgcgtcattaaaattacacctttatctaccaatataagacatgatcgaaagactggatgagttcagtatctaactgaacaaattctagttcctgctcgctgttttgaacaaatggatgctgtttgtttttggcttcaataaggattggacttaagtcataaaactcaaagctatccaccatgtttgaagcaattttaaaagcatgctgcaattggtcaaagttacgttcattttgtaaaagactaagagctgcatcttttaataatactttgactggtgagccaaaggttgctaaaaccatagtagcggcgaggctttcattgacttgtaggctggttagattggcttgggtcaaaataacgagtacagttttcacacaatataccttttaaaagcaacaatctaagttaacaaagtaacttaaaattgaagaagacgagaggctgactgtactgcatcagcaagttcacctagaccaaccaactcaaagttgttcgctaggttgtgatgactaagttgatggcgactcgcattttctgcatcggtaatcccgcgtgcaagagcagcgctaacgcaaacaggaagtctgatcgagagcttttgccattcatgcgttaaattacgctggtcgtcaggaacccactgaaaatcattcgcaacttgaacgccatcttggtaaaagaatacacgaaagtcttcatttttacttttgagtgcctgagctaggcccagcgcatgccaagcatggatcgaagtaggagcagaggttattagtagtaatgtactcattgagaattcactatggtcatacgtctaaatgggcgtagatacattaagagaaaggtaagtatacaatgattttagtgacaggtggtttaggctttatcggttcacatattgcattgagtctcatggctcaaggccaagaagtggttcttgtcgataatttggctaactcgaccttgcaaacgcttgagcggttagaatacatctctggtatgtacgttccgtttgttaaacttgatgtacgtaacacgcctgcattgaacaaagtatttgaacagtactcaattgatgcagtcattcatacggctggttttaaatctattgaagagtctaatttaaaaccgcttgaatattataatgataatgtcagttgtattatgagcctattgcgtgcaatgcaacgtacaggcgtccgtcattttattcatttatctagtttggcagtctatggaaaatctggttcacagttaagtgaaacagatgatttcaactatgcttatcctaacccttatattaagtcgcaacagatgattgaagaaatcatccgtgatacttacaaaattgatcatgaatggaaaattgcaattttacgtctatcaaatattgtaggtgcttttgagcatggtgtattaggcgagtatgtagcacagctccctaaaaatattgtaccgcttgccatgcaagttgcagcgatgcaacgtgatttaattgagttacaggatcagtcttctaccgaagaccataccgtagaacgtagctttttacatgtattagatgtatgtgaggcagtaagctcaactttacattggttacgtgatcaaacccattgctgtgaagcttttaatattgcccatgagcaagtgcattcgattcgtcaattattagatgaaatttcacaggttacccaagccgaaattccgacacaatctgcgatttataagcatgaagagttagcgcagattggtgcaaatataggaaaagcaaaaactttattacaatgggtacctaagcgaactttaaaacaaatgattgaagatgaatggagattttatcaaaatacattaaatggaagatgagataatgattcttatttacaataatggaatgcttgagtacgatactaaaattaactagccaaagcataaattgcttcagcccgtgagttctttaaccagataaccgaggtttctatgcaaacacgaattgaacatgacacaatgggtgagattgaagttccgaatgaagcgctgtggggtgcacaaacccaacgtagcttacagaactttaaaatcgggcaggagcgtttaccccgtgccatgattcgagcgatgggcttggtaaaaaaagcagcggcaataaccaatgcagagttaggccagttaccacaagatttgagccaatatattgtgggggcagccgaggaagtgattgcagggaaatgggactctcagtttccactcgtggtttggcaaacaggttcaggtacgcaaagtaatatgaactgtaatgaggtgattgcaaatattgcaaatcaaaagctaggccaagcgctcggagcacaaaagccggtacatccaaacgatcatgttaaccgcgcacaatctactaatgactcattcccaacggctattcatgttgcggcaagtttgcaaattaatgaattactgatccctgctgtagaacagcttaaagcgactttgcaaaaaaagtcggacgaatttcaagatattgttaaaattggtcgtacccatttacaagatgcgacgccactgacacttggtcaagagtttagcggttatgtttctcagctcgagcatggtttagtacgtttacaacaagctttaagtggtctatatgagttgccattaggtggtacggcggtaggaactgggttaaatgctcatcctgactatgctgttaaggcagcagctcagcttgcagctttaacgggtttgccatttgttacggctcctaataaatttgaagcacttgcaggacgtgatgctgctgtttttgcatcaggtgcattaaaaacactagcggtaagcttaaacaagattgccaatgatattcgttggttagcaagtggtccacgttgcggcttcggcgaaatccgtattcctgaaaatgaacctggttcaagtatcatgccaggtaaagtgaacccgactcaaagtgaagccatgaccatggttgttgctcaagtacttggcaacgataccactattaatgtcgctggtgcttctggtaacttcgagctcaatgtatttatgccagtgattgcttataacttactgcaatctattcagttgcttggtgatgcatgtaatagttttaatgatcactgtgcagtagggatcgagccaaatcgtgagaaaattgatcatttcttgcataattctcttatgttagttacggcattaaatccggttattggttatgaaaactctgcaaaagtggcgaaaactgcttataaagagaataaaactttaaaacaagttgctgtagagctaggacttgttacagcagagcaatttgatgaagtggttaaacctgaaaaaatggtttcgccaaatagtaaataagcgatttaacaatagccatcagcagtatattttgtagcgattttacaaactcttaactactgatggctattatgcttaagatgttaaagttagggccattcatttaccctaagttatttattaataataagagctataccaatagatcttctatatattcccagccattagctttcatctcttcaaactttctttttaattcttcttttgtatattcatgtgagtctttagctaaaagaatatgataagaattagatgctggatctatagtgacctcattaatttctactggctgaatcacaccattttcggtcaaaccaagatcagtaaagcacattccttttaccggaataacactgcattcatactctttagaaataaaataattatttgaataagttgaataggtacgtgaagcgcgaatcttcattgctatctcctttattcgtagagaagatttgagtagtgtggcgcgttttaaaagctaaaactgtttactttttattgtttgtttactatgaatctttgttatttaaaatatttttaacaatctatatcaaaattaactgtagaaccctcctttttaaaagaaggcttcaatatagataagcttatcttgagattttgtaaactttatttttatattcatcacgagaaatgacacctttatcatattgttgttttaatgatctatattgttgataacgaacatctctttgaaggcccatattgtcatgacttctaatgtaatagagacttcgttcatgatcactcatatttacagtatggtcgggagagtgagaataagtgttttgtggttgctcttcttggtagtgttttgcaatctcaaaaaaatctacgttttgtttgtttgaatcagagcggaaaggattgtgttgtgattcgttaattttatgatctgaactattatttacctcaagcatactcttatggcgttttgactcttgtccataaaattcatatttggttggggagatagttgtttcagaaaatacaaaaggagaaaaagtagcagtacttaaaactaataaaattaattgtaatctattcatttctatggaagcccagatgaaagtgagtaaatcactgtattataacactaaatttaacattggactaaaaaataatatatttaaaatatacatatttttaattttcaaagttgtataagatttatttgcaagtttctaggttgtaattattccctattaagctttatcaaaccaacttggtgttgaataagctgccataattgttaaaatgcccaccttatcctgtttttatattattttttaattgctttcgttcttgcaatttttaaattaattatgaaaaacagtcgtttagttaaggatttttttgaatgctctctatttatttaacagatactcaacaacatgtgcaatttaatgattacccaagtgatcagcctgttaaatttctgttaaatcttaaaaagatttttccaagtactggtgatttattattacctgttttacctgaagataatgatctggaaaatgtaacttgggaatcaacctcaaaagactttgaaatcttcaaaaagttattggcaggttggggggtgattgagcttcgtttaaatgccattaccgcttataaagataaaaattttgcaaatgagctaattaaacaagctcaagcgaaacgtaaaaaagtagcacaaaaaaatcatcaactttctctagttgcattggattatatttttatgcacgaaattcatgcactcattgatgctgaactgttcacaataggcgagaaattttatttgccaaccttgcgggagcaatggaaaggtaccgtttcggaccaagtgcttaatggaaagctctaatgaatatcaaaaggtgaattcttataattcaccttttttataattaaatcaaaagtttgtattttttattggtgggttatacaaaagtttacaagaaaagaatgcgtttttttaaaagtggcagatacattgcttatataaatacaaaattattgcgggagagaggttcttaagaacccgccgaaggagcaacaggcccggaaactctcaggcaaaaggactgtaataattaaaaaatctggagagcagcttaagatttataagcatggagaataaaaacttataagtcataaactcaccgaaggggaagatcgaaatactaaaaggtagtatttaggtcgaaactctcaggtacaaatgacagatgggctgtactgatgaaatgttcttgcatttcagaggagtctgttatgccacatgttattgtgattggtgcaggaatcacaggggttacttcagcctatgaattatctcaattaggttaccaagtcacagtgattgatcgccatctttatccagccatggaaacatcatttgcaaatggagggcaattatctgcttgtaatgcagaagtctggaaccagaaagcgaccgttataaaaggttttaaatggatgaggcaaaaagatgctcctttattattgaatccttcctttagcctacataaatatagttggttggttgagtttttgtctcatattaaaaattatgaagccaatacaatagaaaccgttcgcttggcattgcttgcgcgtaagcgcttgtttgatgtagctgaaaaagagcagcttcaatttgatttggagaaacgcggtattcttcatatgtatcatactagggatgattatgacatcgccaagcgagttaatgatgtcctaaataaagggactttagaacgttactcggtttcacctgaggaaatgaaatcaatcgaaccttctttaacgggtgagtactttggtggctattacacaccaagcgatgcaaccggtgatatccataaatattcaacctctttagctgaaaagactaaacaatatggcgttcagtacaaattcggtttggaagttactgatattaagtgtcatgcagataaagtggtgctgaattgtcagccaagtgctgagcatccgcatctttcccaaacagacagctttcaattagaaggtgatgttttggtagtgtgtggtggtgtaggaagttatcagttagctgatatgattggtgaacgtgtaaatgtttatccggtcaaaggttattcaattaccgtccaattaaaagatgaaaaaagtataaaaaatgcaccgtgggtgagtttgttggatgagagcgctaaaattgtaacgtctcgtttaggaccagatcgtttacgtgtagcaggtacggccgagtttaatggttataatcgagatattcgagccgaccgtattcaacctttggtaaattgggtaaaccgtaattttgacatttcaactgagcatgttgtgccttgggcgggtttaagaccaatgatgcctaatatgttgccagttgtgaaacagtctaaacagtctcgagttttctataatacgggacatggtcatctaggctggactttgtcagcagctacagctgttttggtgagtcaggatattcaacaaaagtatcccgcataaaaagaaaagccagtgtctatgcactggcttttttattttatattcactagtcgtacagacgataaattcctgtgaagcgctcacaacctttttgctgggtttttacgatgagcagtgctttctgaaagtcaaatttatatttacagttatgttcattatctaaaatttcacttttctgttcaggagagctgtaagccataagtgaaaccgtttgggtttcttttcggttattcggattacggtaagctaacccttcaattttgattttatctttagcaagttgatgtatttgtaaatgaacgggctgagatgcaatatgtccattttcaaatttaagataatgctgagttagggtttgtttaagtgaagcataaaaatttaaatcatcaccacgtacatcaaactgttgttgaatacatgaattggttttgcattgttgtgtttgtctaagccacaatgtttgagtatcttgtagaagctgcagtggggcatctgtgaccaagtatgcagaaagatatttattgttgagctgctttcgtgcttcgctaaaggtttttgaacagatttttagctctgcttttgagttggagcagtcgatagattctgcaaaaacaagcgatgagcataaacaactcaatgtcacgacaaaacttaatcttttcaattgattcatatcagtattcgacggcatgatcgcttatactttcagtctactttgctaagtgtactatagcgaaacacgacggttgaatacaagatttcttaagcttttataatagaagggaagagtttatatggttgctcaaattcgtattggacaaggaatggatgtgcatgcctttgaagagggtaacttcgtaaccttagctggcgttcaaattccgcatacgcatggcttgaaagcacattctgatggcgatgtcgtgctacatgcattatgtgatgccttactaggtgctctagcacttggtgatattggtcagcattttccggatacagatccagaatttaaaggagcggatagccgtgttctacttaaacatgtttatcaattaatattagaccgaggttatcatttaaataatgctgatattacggtagcttgtgagcgtcctaaattagccaaatacaatttggaaatgcgtcaaagcattgcagatgttttaaatgtagatttaaatcaaattagtatcaaagcgaccacaaccgaaaaacttggatttactggtcgccaagaaggaattttagcaacagcgacggtgttaatatctcattaaactaaatcattggtttgttgcaaagactgttgaagttctaaggtagccttacggccttgaagctgtaaggtaatactatgaatgagtcctgtccatgtttcatttggctcccaaatctcatgaagcaaatcctgacaggttggcatatccatattcatataaaattgtctgtagacatacataagacaacttacgcgtttatttttggcacaatgtatccaaacaatttcattctgcactaaatgatcaatcaaatctaaaactaataagcattggtcagaagagggtgtttcccagtcaattggaatatgaatataatttaaaccatattcaagacagacctgatcttcatttttaatactatctggtgaattcgataaagctaaatttataacagtgctacaaccatactctttaatgagcttaagttgttcgatagaaggttgcgctgaactaaataaatgttcatgaatgatcgaaaatgcagtgatttcagataatgattgttcaagggttgtcataatcgcactctacacgagtaggcttggcttattgtgtagaatgttatacacgattatgtgtgacagttgaaatataggctgtttatatattgggcaacatcataaaaatttttaaaataataaatgagggtaatagggatcttataaaaataaaaaaacagcaccttaacgatgctgttttttgaattagaaattaagcttttttcaaattttcgttgagtaaaaattccattaaagctttttgtgcatgcagacggttttctgcttcgtcccatactacggcatttttatggtcgagcatggtttcagaaatttcttcaccacgatgagcaggtaagcagtgcatgaataaacagtccgggtgtgcaagccccattaatttctcgttaacctgaaaatcagcaaaggctttttcacggagcttctgttcttcttcttgtcccatgcttgcccatacatctgtaacgataagatcagcatttacagccgcatcttccgcattatcaaaaagttcaacacaatgcccaaactctgctaaaaattcaggtttaggttcataactttttggtgatgcaatcttgagtttgaaacccatcatgtgtgcagcttcaatgtatgaattacacatattattgccatcaccaatccaagctacggttttgccttcaatgctgccgcgatgttcaatataagtttgtaaatctgcaagtaactgacaaggatggtgatcatcagttaagccattgataacgggaacttttgaataagatgcaaaacgttcaacaatatcgtgaccaaaagtacgaatcattacgatatcaagcatgcttgaaataacacgtgctgaatcttcaatcggttcgccacggcctaattgcgtatcacgtggtgataagaaaatggcactaccaccaaattgattaataccagcttcaaaagaaatacgagtgcgtgtgctcgatttttcaaaaatcattcccaatactttaccaacaaaaggttgatataccttattgctttgctgcattttcttaagttcgcttgcgcgttccaaaatgcgattaagttctagagtggatagatcacgtaaagtcaggaaatgtcttagagccatgtagctactccataataattgttttgaattacaacaattatctgttgttggctgggtggaagtgggaaaaaagaagtctactatactataagcatttcaaaatgcaaaagaattagactttatgatggccctttaagaaaatatcaacacaatagttaatataatcaataacttctgtctcattgggtggaagaggcattcccataatcattcgccattcaatatcacgtaaaattccaaaatacataagagaggaatgatcaggagatgtacaggtaatttcacctgattgatgagatatgagtaaggcttgagcaattgtattttggacatccagagcacatttttcatataagtattggctcaaagttgcattacattgagtttgttcaataaccaaacgtaaaaaggcaatgtgttcaggttgaataatgtgtttataaaaacggatgagagtttggattaaataatcttttaaagaagtttgctctggttgaaatgcaatgcagatatctttaaaaaacatttcacggcgataatcgcagattgcagtaaataagccatctttattaccgaagtatttataaatagaggtttttgaaccaccagcatgattgacgatgtcgtcaagagagacagcatcatatcctttttccaaaaacagctcggttgcgcttagcaatagagctaaacgacgttctataccgcggcgtgtttggggtttttcacatacgagatgatgtgactcaaggactggatcatgcataaaatttaataacgacggctaacactgcttatctagtatagcaaatctatctttaacgatggtcattggtatgtttttaggtcatctggtaaacaataagtagagcatagttttggggaaaatatagaaaatataatgatttatgtagaaatttagaattttttgatcatgtaactgtatgttcacattttagtttggcagttaattccgatttaaatagtcataaagaaaagtggctaaattaaattagccgctttttgatttttgcttcggttttaagcttctgacaaagttgctttatgttcgtcctcatcatcgtcatcagcagaatccatgcctagctcttttaactttctggttagggtgttacgaccccaacctaacagctcggctgcatgacgtttgcgcccacgagtttgctgtagtgctgcgttaattaaggtgcgctcaaacattggagtagcaatgtctaaaatcttcatttcaccatttttaagtttttgaattgcccattggcttagtagctcatcccaatggtgcaaagaaatacgttcaaaagatggtgctggttgactagtctcactacttttttggagtggaacctgtttaagctcagaaggtaaatcttccggataaacctcacgaccagtaatcatgacggttaaccaacggcaggtattctcaagctgacgaacattaccaggccaaggtaattgttgcatatagtccgttgtttcagtgcgtaaaatctttggacttacacctagctctttacccgcgcgagccaagaaatgttgagccagcatcgggatgtcttcactacgatgtgcaagcttcggaatatgaattcgaataacatttagacggtggtataagtcttcacgaaaacgaccttcattcaccagtttttctaagtcttgatgggttgccgcgacaattctgacatctactttaaccggtatatggccaccaacccggtaaaactcaccatctgcgagcacacgtaacaatcgagtctgagtttcaaatggcatgtcaccaatttcatcaaggaagagagttccaccatttgcttgttcaaagcggccttgatgttgggtgtttgcacccgtgaaagcacctttttcatgaccaaataattccgtttcgattaaatctttaggaattgctgccatgtttaaagcaataaaaggcttagcgcgtcgtggagaatgtttatgtaaagcatgcgcaaccagttctttacctgtgcctgattcaccattaattaaaacggtaatatgcgactgagataaacgaccaatcgctcggaaaacctcttgcatagcaggagattcgccaataatttctgttgattgtagtggtgaagctgtttttgtcgcttcttgctgctgcaatttattgatatgcaaaatcgctcgattgactagagctaaagcttcatcaatatcgaatggttttggtaaatactcaaatgcaccagtctgatagcttgatacagcagactctaagtccgaatgcgctgtcataatgataacaggcaagtcggggtgagagtttttcactttagataagaaagttaacccatcaatacctggcatacgaatgtcagttaagatgacatcgggcgcatcatgatgtaaacgttcaagtgctgtttgagcttcttcaaaattggtgacgtcaaatccttcttctttaaaggtcttttcaagtacccatcgcatggcgcgatcgtcatcaataacccatattttatttcgcgacacggtctgactcccaaggtaaatataagctaaacattgtttttccaggaactgattggcattcaatcattccgttatgttgatgcatgatgttctgtgcaatactcaggccaagccctgtgccttttgctcgtcctgtaaccaaaggatagaacacagactctaaaatgctttcgggaatacccggtccattgtcttcaatatcgactcgtacagcagagcggttaagtactccattaatagtgactagacgttgaatacgggtacgtaaaattaattcaggctcttgatctgtaaaaaatgatttattttctgtaatagcttgaattgcattaacgctaatattgagcatgacttgaatgagctgatctcgatcggcttttacatcgggtagagacaaatcataatcacgcgtaattttgatttttttcttggtctgatttgcgattaaagagcgtacccgttctagaggttcatgcacatttacattttcataacttggcaattgtcttgagcccaacatggtgtcggccaaattggtgagacgatctacctcgttaataatgatatccgtaaattcagcatagctctcgtcatttaaactacgagcaagtaactgagttgccccccgaataccagccagagggtttttaatttcgtgagcaacgcctcgaaccagttgtctagccacttgatgttgttgaattaggttttcttccttagaaattttcaacatacgatcaataggatttaactcaataagtaagagcgggtggtagcttttacctgcatttaattgcgagaccgtataatccacatgtaaatctttaaaattgacattaatgatggcttcacgacgtgtataaggttgtcccgtttttaacgtgttcaataaggcttcatgcgtattaaaggtatcatcaggtgcatgaagtaaatttaaaaccggttgtccagaagcgcgaagcaaactaatgtcaaaaagtgcttcacaagcggaatttaaataaaaaatattaaagttactatcgattaataaaatcgcagtagttaaattgtctaccaataggcgatagtcgataggtgtgtgttgatccattagcgaatcgttcctgtcttaaaatggcgcaatggcatcttcattggttatcggttttcaccgttatagaacatgattgatgcaaaatgtacgccaactttgtttatggtttattttaaggttttaagcgtaattaaagcgctctaaaatcgttcttaatatcttttggtcaaaaatacggatgtatacatcaataatatcatgactcaacttggtgcaatattgagttttggtgcaaatattggttgtattttggtgcattacacaaagagtggggtttccacctatgcttgagacgagaaaagacatacaatacgcgcattcaagtggagcgcagattcatgaagacccccaaagtcggttttgtttctttaggttgtcctaaggcattggtagattctgaacgaattttaactcagttaaagactgaaggttatcaagttgcatcagattatgatggtgctgatttagttgttgttaatacctgtggttttattgaatctgcagtacaagaatctttagatgcaattggcgaagccatgagtgaaaatggccgagttattgtgacgggctgtttaggtaaagacgaagataaaattcgtcaaatgcaccctaatgttctaaaagttactggtgcagcagcttatcaagacgttatggaagctgtacatgaatatgtcccagcaccgcctaaacataatccgtttattgaccttgttcctgagcaaggtatccgtttaacaccgaaacattatgcttatttaaaaatatctgaaggctgtaaccaccgttgtaccttctgtattatcccgagcatgcgcggtgatttagtatcacgtccggttggaagcgtattagaagaagctgctgcgttaaaacgtgcaggtgtaaaagaaatcttggtcatttcccaagatacctcagcttatggcgtagataccaaatataagctcgatttctggaacggacagcccgtaaaaaccaaattctttgacatgtgtgaagcacttggtcagcttggaatttgggttcgcttacattatgtatatccatatccacatgttgatgcagtaatcgatttgatggctcaaggtaaaatcttgccatacctcgatattccattccagcatgcaagcccacgcgttcttaaattaatgaaacgtccggcgcatagtgaaaatacattagaaaaaattaaattatggcgcgaaaaatgcccggatcttgtgatccgttctactttcgtggttggctttccaggcgaaactgaagaagacttccagattttgctcgattggttggttgaagctcaacttgatcgtgtaggctgctttacctattcaccagtagaaggcgctacggcaaatgatttaccagatcatgtgccagaagaaattaagcaagagcgttacgagcgctttatgcaagtgcagcaacaaatctctgctgccaaattacaaaaacgtattggtcaaacgatgactgtattggtcgatagtttggaagatgaatatcctgttgctgttgcacgttcttatgccgatgctccggaaattgacggtaatgtctttgtagaagatatcgataagagcactattcaaccaggcgatatgttggaagtcgaaattaccgatgcggatgaatacgacttatttgcaaagttaattaaaattaaatcggtctaatcgaatcgcgattcaaaaagcattcagtttaagaggtcttggagcaaaatcatggcggaaacaatcagcccccgttattcacgaattttattaaaattatctggtgaagctttatcaggtaataaagatatgggtattgatgctcaagttttagatcagatgtcactttctattgcacatttggttggcttgggtgtgcaagtaggtatcgttgtgggtggcggtaacttatatcgtggtagccagttacaaaaagacggtttggttggccgtgtaacaggtgatcagatggggatgcttgcaactgttatgaatggtttggcaatgcgtgatgcattggtgcgccgtaacatcagaactcgtcttatgtcagcgttaccaatcggtactgttgtagagtcttactcaagtcgtgatgcgattcgtcatttaagccaaggcgaagtgtgcgtttttgtagcaggaacaggaaatccattctttacaactgatacagcagcatgtttacgtggtattgaaattgaagcaaatttaattttgaaagcgaccaaagtagacggtgtttataataaagatccgagtaaatacgaagatgcggtgaaatatgaccatttaacatttgaccaagtgttagatgaaaaactgggtgttatggatttaacggcaatttgcttatgccgtgaccataatgttccattacaagtatttgatatgaataaatctggtgcgctattgtcagtggtaatgggtgaaaaagagggtacacgcgttactaaataatgtacgtgtgccgtaaagctctttatactagcgctaaattaaatttgttatatacatccttgaataaataagtaaggaagatcatatgattaacgatctgaaaaaagacagcgaacagcgtatgttaaaaactcttgagtctttggaacaagggtttgctaaagttcgtaccggccgtgcacacccatcaattttaaatggggtaatggttccttactatggttctgatgtgcctttaaaccaagtagcgaacgttggtgttgaagattctcgtacgcttatcgttcaaccatttgaacgtacgatggttgctgcaattgataaagcaattcgtgaaagtgatttaggtttaaatcctattactgctgattcaatccgtgtacctttgccagctttaactgaagaaacacgtcgtgatatgcagaaaatcgctcgtagtgaagctgaaaacgcgaaagttgctatccgtaatattcgtcgtgatgtattaggtgatatcaaggcattgttaaaagagaaagaaatttctgaagatgatgagcgtcgtgcaggcgatgatatccaaaaaatcactgataaatatgttgcagaagtagacaagcgtctagcagcgaaagaagcagaattgatgaaggtctaatttttatgaccgattcagaagagtatcatcttcctcagcatgttgccatcatcatggatggcaacaatcgctttgcaaagaaaaatcaaatgcaaaaaggcgatgggcacagagagggtaaaaatgttcttgaccctattgttgaacattgtgttaaaactggcgttcgtgctttaactgtttttgcattttcgagtgaaaattggaatcgaccacaatatgaagtcgatctgcttatgaaacttcttgaagaaacgattcatgagcaaatacctcgcatgaagaaattcaatattgctttgcgctttataggggatcgttcccgattaccttcacatttagttgccttaatggaagatgcagagcaacaaacagcacatcatgacgccatgacattaactattgcagtaagctatggtggtatgtgggatattgcaaatgcagctaagcaggttgctcaagcagtttcccgtggcgaaattgacgctgatcaaataaatgttgatttgttcgaaaaatatgtcagtctaaacgatctgccagctgtggacttgttgatccgtacaggtggagatttccgtatatctaacttcttgttatggcaagcagcttatgcggagctgtattttacggatactttgtggccggaatttacagtggaagaattcgaccatgcattgaatgtcttttcagggcgtgaacgtcgtttcggtaaaacatctgaacaaattcagcaagagaaaatcgagaaattataatgttagagcggattgttaccgcattggtacttgttgcagttgttttgggctgtatgtttgctacgcaatcacattatccaatgttggtacttatgattgtagcagcaggagttgcggggtatgaatggtataagttaatgcctcgggaagttggtgcagtagtaaaacctaaagcttggggttatggtctacttgttgcctttgtttctggtgttgccttattctttcatgacattgctttactgttatggtctgcttcaattttaacttggctcgttagtgtttattgggttaagtcttttcctgaattcgatgggtggtataacgcgaccctatatgtcattggtttgattcttatctgtgcagcagtgactgcaatctttgtagtatggcaaagctcaccatggtggttgatgtatttgttcttgcttgtgtggggtgcagatagtggagcttactttgtaggccgtaaattcggtaaaagaaaattggcgcctacagtaagtcctaataaatcagtagaaggtttatatggcggtattctcactacaattattgtaatgcttgtggtgcaatatcaatatttaaacctaacttgggttcaacaacttctattcttgattttgtctttaattacagtgttcggttcagtattaggtgatttatttgaatcaatgatcaaacgccgtgctggtattaaagactctggccgtgttttgccaggtcatggtggtgtattggaccgtattgattctttactcgcagcagccccgatttttgcaacgggaatgtatatattaaagcttattggtgtagatttatagatgacacaatctgtttgcatattgggtgtaaccggttctattggacgaagtaccttaaaaattttaggtcaacatccagataagtattcagtctttgcagtttcggcgcatagtcgaatttctgaacttgttgaaatctgcaaacagtttcgacctaaagttgttgttgttcctgaacagaaaatagttgaactaaaaacactatttgctcagcaaaatatatcggatattgatgttttagctgggcaagagggtttagtcgatatcgcatctcatactgatgtggatattgttatggcggcaattgtaggggcagctgggctgttgccaactttagcggctgttaaggcaggtaaaagagtactacttgccaacaaagaagcattagttatgtctggtgaaatcatgatgcaagctgctcgtgatcatcaggcattgttattgccagttgattcggaacataatgcaattttccaatcattgcctcataattatttacaagcagatagaacagggcaaccacagctaggtgtatctaaaatattgcttacagcatctggtggtccctttttaaatcactccttagaacaattgactcatgtaacgccgcaacaagcatgtaaacatccaaactggtcaatgggacaaaaaatttcggttgactcagctactcttatgaataaagggttagagttaatagaggcttgtcatttattttcaatatctgaacattttgttacagttgttgttcatccacaaagtatcattcactctatggtgcagtatgttgatggttcaacattagcacaaatgggtaacccggatatgtgtactccgattgcacatgcattggcatggcctgagcgtttacaaactaatgtacctgctttagatttatttgagtattctcaacttaattttcaggcaccagatacccaaaaatttcctgcattaaatttggctagacaagcaatgcgtgcgggaggtttggcaccaaccattttgaatgcagctaatgaaattgcagttgaagcattcttaatggaaaggattggatttacaagtattccgcaagtggtagagcatactttggaaaaattagagaatgcagcggctgaaagcatcgagtgcattttagataaagataaagtggctcgatctgtagctcagcaatatatatcaagtattggaggctgaaatgaatgcactgtttatgattgcagcggcagctcttttacttgggcctctaattgcaatccatgagtttggccattactgggttgcgcgaaaacttggtgttaaagttttagtctactcaattgggtttggaccaactttactgaaatggacgtctaagaagtctggtattaaatatcagctttctgccttacctttaggtggctatgtcaaaatgttggacgagcgagaaggtaatgtggcagaacaagatctaccatatgcttttaaccggcaaaaaccgtggaaacgtatagcgattgttgctgctggaccattaattaacttgatttttgccgtactcctcttttggattttgtttttaccagcccaagaacaattaaatactaaaattggcaaaattattccaaactctccagctgcagcagcccagttacatgtaggtgacaaaattattgctgttgatgggaaagagacagcaacatgggaaaagctaaactttgctttgattgatcgagttggggaaacaggtactgtaaatattgatgtggaccgtgctggttccgaaaaaaattttgtattaccaattaaagattttttaaaaaatcaaaatgaatctgcactggacgtattaggtttcttaccttatcgacctgtgattcctgctgttgtaacagagttaacggaagatggtgcggcgattcgtcaaggaatgaaagtgggtgatcgtattgttgcgattgatggccagcctatgaaagattggttcgacgtggtagaagttgtccagcgttccccagaaaagttacttaagattgatgtcttacgtcatgaacaactagtacatttacaagttatgccacaaggtaagcgtgatagcatggggcaggtaaatggagtacttggtgtaaaaagtgatgctggaaaaattacaattcctgacgaatataagcaaacaattcaatatactccaatacaagcttttgaaatggcacttgataaaactggccaaatctctagcatgattttgaattcaatagtaaaaatggttaagggactaattggattagaaaatctttctgggccaattaccattgcaaaagtagctggccaaagtgcagaaatgggttgggaaacctttatctcttttatggctttaatgagtgtaagtcttggaattttaaacttattaccaattccaatgttagatggtggtcatctagtgtattacattattgaagctattcgtgggaagcctgtttctgaacaaatacaaatgtttggtctaaaaattggtatggtactgctcggtagtatgatgcttttagctttatttaatgactttatgcgtttgtaaacgtatatggatttataacttactggaaaaaactggcatgcggcacacacattttttaatgcctttggcacttgttagcgctatggcagcggtacaacaagcatatgcagctgatgatttcgttgttagagatattcgtgtaaacgggttggtccgtcttacccctgcaaatgtttataccatgttgccaatcaacagtggcgatcgcgttaatgaaccgatgatcgccgaagcaattcgaacattgtatgccactggactttttgatgatattaaagcatcaaaagaaaatgatactttggtttttaatgttattgagcgcccaattatttcaaagcttgaatttaagggtaataaacttattcctaaagaggctttagaacaaggccttaaaaaaatgggtattgctgagggtgaggtttttaagaaatctgctttgcaaaccattgagacagaattagagcaacaatatactcaacaaggccgttacgatgctgatgttacagttgatacagttgctcgtccaaataaccgcgttgaattaaaaattaattttaatgaaggaacgccggcaaaagtctttgatattaatgtaattggtaatactgtttttaaagacagtgaaattaaacaagcatttgcagttaaagaaagtggttgggcttctgtagtcacacgtaatgaccgttatgcacgtgaaaaaatggctgcaagtcttgaagctttacgtgccatgtaccttaacaaaggctatattaattttaatattaataattcccaactcaatattagtgaagataaaaagcatatctttattgaggttgctgttgatgaaggtagccagtttaaatttggtcaaactaaattcttaggtgatgcactttataaacctgaagaattacaagcattaaaaatttataaagatggtgatacctattcacaagaaaaggtaaatgcggttaagcaattactcttacgtaagtatggtaatgcaggttattactttgcagatgtaaatattgtgccgcagattaataatgaaactggcgttgttgacttaaattattatgtgaatccaggtcaacaagttaccgtacgtcgtattaattttactggtaatagcaaaacttctgatgaagtattacgtcgtgaaatgcgtcagatggaaggtgcattagcgagcaatgaaaaaattgacttatctaaagttcgtttagagcgtacaggtttctttaaaaccgttgatattaaacctgctcgtattccaaactctccagaccaagttgacttaaacgtaaatgttgaagaacaacattcaggtactactacattagcggttggttattcgcaaagtggtggtattacgttccaagcaggacttagtcaaactaactttatgggtactggtaaccgagttgcaattgatttatcccgttctgaaactcaagactattacaacttaagtgttactgacccttactttaccattgatggggtaagccgcggttataatgtctattatcgtaaaacgaagctgaatgatgactataacgttaacaactatgtaacggatagtttcggtggtagtttaagttttggttatccaattgacgaaaatcaaagtttaagtgcttcggtgggcgttgataacactaaagtaaccacaggtccttatgtttctacatatgtacgtgattatttattggcaaatggcggtaaggcaactagtaaaggtacatattgcccaacagatgcaaatggtaattctcaatatgataccgagaagggggaatgtaaagtccctgaagaaacttatgataatgcatttgaaggggaattctttacttataacttgaacttgggttggtcttataacactttaaacagaccaattttcccaacgtcaggtatgtctcatcgtgtaggtcttgaaattggtttaccaggtagtgatgttgattatcaaaaagtaacttatgatactcaagcatttttccctattggtagtaccggctttgtacttcgtggttatggtaagttaggttatggtaatgatttgccattctataaaaacttctatgcaggcggttacggttctgtgcgtggctatgacaacagtaccctaggacctaaatatccaagtgtaaatctacaagaaactaagcaaaatgatagttctcctgaagaagtaggtggcaatgctctggtccaatttggtacagagttagttttaccaatgccatttaaaggtgactggactcgacaagtacgtcctgttctttttgctgaaggcggtcaggtttttgatactaaatgtaatattgataactctgtttatggcaacaaaggtatgaagattaatggccagaccattacggatgttagaaaatattgtgaagataattatggatttgatttaggtaacttacgttatagtgtgggtgttggtgtaacctggattactatgattggtccattgtcacttagctatgcattcccgttaaatgataaaccgggtgatgaaactaaagaaattcagtttgaaattggtcgtactttctaagtacgatctttttgcataacgaaataaggaaagagatttatatgaataaattaaataaattaatgttagggttaggcctgacagtagcttcagtagcagctaatgcagctggttatggggtaattgatcttgctaaagttgttgaaagtagtacttatttgaaacagcaaaatgcaagcttaaaccagtctgtgaaaccaactacaactaagcttgagcaattaggtaaagagttagaagggcttcaacgtcaagcgcagactcaaggccaaaaaatgaaagaagatgagattaaaaaattacaatctcagtatcaatcgaaattaaatgagtttaattcaacacagcaaggcttacagtcaagagttcaaacgagcttacaaagtatgaatacaacttttgagactagagttaagcaagctgctgagcaattacgaaaagaaaataatcttgactttattttgaataaaaattcgactgttgcctatgacgctaagtatgatttaactgataaaatgatacaaaaggttaattcaatgaaataaattaatgaaagtgcaacaatatcgtttagatgaattagctcaccttgttaaaggtgagctaattggtgaaggtagtcttcaattttcaaacttggcgagtttggaaaatgcagaggttaaccatcttacttttgtgaatggtgagaaacatcttgatcaagctaaagtaagtcgtgcgggcgcttacattgttaccgcagctttaaaagaacatcttcctgaaaaagataattttattattgttgataatccctatcttgcgtttgcaatccttacccatgtatttgataaaaagattagctcaacaggcatagaaagcactgcccaaattcatccatctgctgttatttccaaaactgcttatattggtcactatgtggttattggtgagaattgtgtagttggcgataataccgtcattcagtcacataccaaacttgatgataatgtagaagttggaaaagactgttttattgattctcatgtcactattacaggtggttctaaattacgagatcgcgtccgtattcattcaagtactgtcattggtggagaaggttttggttttgctccatatcaaggaaagtggcatcgtattgctcaattaggttcagttttaattggaaatgatgtccgaattggatcgaattgtagtattgatagaggcgcacttgataatacaattttggaagatggggttattattgataaccttgtgcaaattgcacataacgtccatattggttcaaatactgctattgcagcgaagtgcggtattgccggaagtacaaaaattggcaaaaactgtattctagctggggcgtgtggagtggcaggacacctttcaattgctgataatgtgactttgactggaatgtcaatggtcacaaaaaatatttctgaagctggaacttactcttcgggaaccggattatttgaaaataatcattggaaaaaaacgattgtacgcttgcgacaattagcagatgtgccattgacccaaatcactaaacgacttgatcatatacaagctcaaatagagtctcttgaatcaacttttaatttgcgtaaatagaatattatgaccgagtctactacacctaaatttgccatccctgaattaccaatgcagattcaaacgattcgtcaatatttgccgcatcgttatccattcttattggttgatcgtgtgactgaagttactgacaatagtattgttggttataaaaatgtttctatcaatgaagagttcctacaagggcatttcccagaatatccaattatgcctggtgttctcattgttgaagcattagctcaagtttcaggcgttcttggttttattatgaacaatgaaacgccaaaaccaggttcattattcctgtttgctggtgcagaaagagttagatttaaaaaacaagtagttgcaggtgatcaacttgtattaaaatctgagttggtaatgcagaagcgcggtatctacaaatacaattgtacagctagcgttgacggcattgtagcagcaaccgctgagattatgatttcacaccaaaaaacagagcaggcatgagcaatcacgatttaatccattctaccgccattattgatccatctgcagtgattgcttcagatgttcaaataggaccttattgtattatcggtcctcaagtgactattggtgctggtactaaattacattctcatgtggttgtaggtggttttaccagaattggccaaaataacgaaatctttcaatttgcaagtgttggcgaagtttgccaagacctcaaatataaaggtgaagaaacgtggcttgaaattggtaacaataatctaattcgcgaacattgcagcttacatagaggtacggtgcaagataatgcattaaccaagataggtagtcataacctattaatggtaaatacacatattgcacatgattgtatcgtaggtgaccataatatctttgctaataatgtaggtgtcgctggacatgtacatattggtgatcacgttattgtgggtggtaattctggaattcatcaattctgtaagatcgactcttatagcatgattggtggggcttctttgatccttaaagatgttccagcctatgtgatggcgtctggtaaccctgcacatgcgtttggtataaatattgaaggtatgcgaagaaaaggttggtctaaaaatacaattcaaggcttaagagaagcttataaattgatatttaaatctggattaacttctgttcaagctattgaccaaattaaaagtgaaattttaccttcagttccggaagctcaactcttgattgattctcttgaacaatcagagcgtggaattgtgcgctaatcaagaagacataaaaaagacactgttttaacagtgtcttttttataactaaattatttgttaaagaattttgcttcttcagactttggatattggctaagtaacttgttcttgtattgatttgctgacacagtattcttatcaacatctttagcgatactataaagttggtacaatgctcgaggtgccttacttgaatttgggtattggttagctacgacattatagtttttctttgcttcattataatttactggatctgtcgctaaatgaaactcggctaaccaaaaataagcattacctgtatagatactattaggatggttttttataaagttttgcattggagcaattgcttttttagcaccgccttgtttatacgcatctaaagctacagtataagcagctttttctaattcgagggaatttgactggttttgcgcagcagctggtgctggttgagtagtggttgttggtgcgctaggctgctgctcagaagtttgtgtggctggtactgcagctactttattactctctgtggtttgaggggctggtgcactagcaggagtagtgttatcggatgttgcattcgaactatcatcttgtgtagcactgtcagggtcaactttttggtgtaataattctaaacgttgatctaagtcggtatatcggtttgctagatctttctttaattgctcaatatcattagcttgttcttcaagctgacctcttaatgtacgaatatcattttctaattgttggtttttttgcatgagttcccagtttaaatttgtaggaactgaaatattgcttgaagaagtattagatgcactaccatcattttgacttaaaccacgagactcgatagggatatttgcgtatagagaagtggtgctcattaaggcaataaataataaagaatgcttcttcatttgcatgtgtataaatccataattttatataaaagccaccttgacacaggaatataaaaaacaattctctaaatatctaaggtttttcattgatcaatgcaattaaagcagttaacagtttaaatgcaaggatagtttacaatcttcaagcatattttatgcaaaataagaaaagagcataagttcaagaaattacatttttggggtttaaagccatttttgctgaggaattaatcaatcgaaacaaaaacttgccgaaaaaggcagagaagggttgcaactcttttaaaaatctctatactttgttttgcaatggtagccccgctggtggcttcgcaattgtactctgtgaaccccgccaggaccggaaggtagcaacggtagcagatctatgatgtgccgaagttttgctagtggggttgccaccattctttcaatccaattttctttggattgcttttaaaattacatctaaatcaaatcctctatattgtaagaatctgatctgttttgctttaagttttggatctttctctacagcttctccaaattttttaactttaagttgataagcttgttctacccaatcaatttcttgaatttcatctgcaattaaatcattttcaatttgtttagtttttaaagcttgttgaatccgtttcggccccttacctttacgaatttggcttgctagcatttgctcagcaacacgctgatcactctggtaattttgttcagataactcctcaaccagttgttttacttcttctatattttgtgcataacgagctaatttctcgataagctctgctttagagtaatctcggcgagtgagtaaagcaaaagcatatgagcgtaaacgttggccagtaagaggagggcgctgctgagattgctcatcgtttcttttgaacatataaaattccttgtaaaaaacgccccgaagggcgttttatgactcatgtataattacgattctaataaaagatctggctcttcttcatcttcaatttgaactgcaccatttgtgcctgtagtcagcaattgttcacggatattacgttcaatttcttcagctatttgagtattttcttcaaaatagcgaattacattgtttttaccttggccaattttattgccttgatatgaataccatgcaccagctttttgtacgatatcctgttgtacagctaaatctacaagttcacctagttggttagtacctttaccgtatagaatttggaaaatagcttctttaaacggaggagccattttgttcttaacgactttaactttagtttctgaaccaacaatttcatcgccttcttttacttgaccgatacgacgaatatctaaacgaactgaagcgtagaatttaagagcattaccaccagtggtagtttctgggctaccaaacataacaccaattttcatacgaatctggttaatgaagataaccatacagtttgaacgtttagcattacccgtaattttacgaagtgcctggctcataagacgtgcttgtagacccatatgagagtcacccatctcaccttcgatttctgctttaggggtaagtgcagctaccgagtccacaacgattaaatcaattgcgcctgaacggacaagcatgtcagcaatttcaagtgcttgctcaccgttgtcgggttgtgaaacaagtaggttatcaatatctacaccaagtttgcgtgcatattgagggtctagggcgtgctcagcatcaatgaaggcacatgtaccaccagatttttgacattgagcaattgcttgcaatgtcattgtagttttaccagaagattcaggaccataaatttcgataatacggccttttggtaaaccaccaatccccaatgcgatgtctaaagttaaagaacctgtagatacggcttcaactgcttgaacagtgttatcaccaagacgcataaccgtatttttaccaaattgcttctcaatttggctcaaagcggcttgtaatgctttgcttttattctcatccatctcaaaaacctcaatactctatgttcatcacgtttaacccaagtggatgcattgaatctcaacttgtttcacagggctaatagtgacagattttttctctagcttctatatattgtatatgtgagtgcgacacaactcgacgtttttattcatcattataagaccagtgatcttcataatgttgatcattatcctgtttaaaccgattgatttgtcgccgatctttcttgcttggtctatggtcaggtcgtgctagattatgcaattttcgttgggaagcaatcaactcccgtcttgcaatacttacttctgtttcttcataaagttgttgtgcaacaggggccggtcctcgggtattggagagcgctttaacaacaactgtttttttatcgaaaccttgttgaacaacgagctccataccgacacgaatttctttagaaacttttacacgttcattattgtgatgtactttacccccttcaattgcagctttagcaatagaacgggttttaaaaaaacgtgctgcccacaaccatttgtcgacacgcatggtttctacagcatcgtcttcacgcaattttgacatcattatcctttctatcaatttgattcaaaatagacagtagctctgtaagctgatctagagctttatactctaaatcttgtggctgtcttatactcttaagacttgagggctgtaagatagtaaacaagtgtcttataccaaatttttctgcagtttttaaaacaggaagtgtgtcatctaaaaaaatagtgctttctggcgcaaaatgatgcaagcgttgcaactctttccagaattggatgtcttcttttgcgtaaccaatttgttcgctagatacgatgacttcaaaaaaatcttggataggaacgttatcaagttttaattttaggcttgcacagtcagcattggtgactagccaacattgataatcttgtgcttttaaagcgctgagcagctccatgcatcctgacctcgctttaattttatgctgaaattcttgctggagctttaaaacatccacaccagttgtttgtgtccagaagtttgatgagtaccaagcaagggtatgtttatggctgcgataaaactggtttaatatttcttgactctcagttaaagatagatgatgtgtttcagaatgtcttttaggtaagcattcgttccagataaagtcatcaaaagctaaatctagtaaagttccatccatgtcaaacagcactaccttattcatgttgcgaacgctccagctttaaatatacatggaagaaattagcttaggattataaacattaaagtctcaaaaacagattgatttgttgttatctcatcattttaaagttctaaagatattttacttttgatatattatttcaataattaatgataacgagtgaattaaaaaatgaaaaattctaatttctttgttgtttttatcggttctatttgttttacatttagtgcaaatacattggcacaaaatataactgcagttttttcacctaaaagaggtgtagtctgtgataaatatatttgtgcagataaaaagggagtttccaaatccttaactaatcaatatttaggtgcaaaaaaagcaaaacaagctttttcacaaggtgactttgatacatctgcttttactttttctaatggtgtattttgtgataccactactaaattgtgccatgtgaataaattttttgaaaatggtcatagaagtagagtagataaaaaaatgactgataaaatttttaaaaataggtagttgtatgagttgtaaattagttttttgatacttttttgcgtttctatactttatatgaaattatcattatttaaatattattaaaagttggaataaaagtgggattatatacaattagatatggttatcgtaacaacagtttttttattgcttcaaacacggctgggcagtttattgtgattgatgcattaggagcagatttccaaattggtcatcaaatttcttatgaagggagcaaaataataaacgaaacattaaatgatgaaacggatgcaaaagttcatcttgagagcaacgaaaaagaagcttatgagtatttacggacaatgaaataatcatctcgttattttgatttacataggatacgtattggcaaacattttataaattgaactctacttatttaaagttatattaaaaatcatttgaataacaatttagagtaggcgatgaaaattggatttattggaggagccaatgatggcatagtgatcaatgctgccaatggtattgatacttataaacttgaatggcattacaaggctgagaagcattgtgaagaacagccatcattagggctaaatggccctgaatatgactattacaatttattaattttgagaaaaaataaagaggcaaaactcttctacgttttaactaccatggacaaagaagatattgcggataagattaatgagtattgggagtattccacctctgtaggttatgactttgatgagtagtaaccattttaactcattgaaatattttatttatatcactatttaactgaattataactcaagcttaggatgatatatttcataaagaacatgcttttgtaaggcatgttcatctggaagcttgggatgattaaagtatttaactttgcgcattcctagtctttccatcacggcttgagatggcttattcactgttgctgtgaaagaaaccactttatctttattgagaatattaaaggcatactccaatgctgcttttgctccttcagtggcataaccttttttccagtgttctgtagcaattctccatccaatttcaatgcagggagaaaaatcaaattgttctggttggttgtgtaagccaataaagcctataaattcttgagtttcttttaattctaccgcccaaaatccccagccattttcatcaataagagctgatattctttgaattaaacttatactttcagtagcaggtaaaagctttgggaaaaaacgcataacatcttcgtctaaacccattttgataaatggctctgaatcagactctttccattgtcttaagattaaacgttcagtttcgatcatagtaaaaattctttaacgagagtttttaattttagctaaatattctacagcggcttttgtataattttctgtaagataatttttgagttaatgcttaccacacctttaattttattgagtgtattaataacaaaatgagaaaaagagtttagatctttagtggcaacgtgcagtacataattagattcacctgtaatgatataggcattgatgacttcatcaaaattcttgatttggcttaaaaaaaagttgtggtcattttcggtgagttgagcaagttttatttcaactatcgcctcaatttttatacctaatttttcataattaactttcgcttgatatttttcaatgattccgttggtttctaaaattttgacgcgtctgtgacaagcagatgctgaaagattaacaagatcagcaagttcttggttacttaaacgggcattgtcttgtaaatacttcaaaatttttagatcaattgcatctacattcattttcgaatttcatccatattttttaattttaattagaattttatacgaaaatagctatttttgatcaaatattatcgaataaatcgtacaaattgacgtgataaaattcaaatacaaaggaaatgtagaaataggtgcaataccaaatgattactcgtgaacagtgtttgtattgggatcaggaagatgaactcaaaaaatttaaagatgaatttgcattgccagaaggcgttatttatttagatggtaactctttaggtgctagaccaaagaaatctttggctgtcgctcagcatattatttcccaagaatggggagaagatctgatcaatagctggaataaggcagattggtgggggctaccaacgcggctgggtgacaaagtcgctaaactgattggtgcggaacaaggtgaagttgttatttcagattcaactacactgaacttatttaaagttttatctgcagcggtaaaaattcaggctgataaattccctgaacacaaaattattgtggcagaaaaagatgcttttccaacagatatttacattattgaaggtttcattgacttaattcaaaagggctatcaggttgaattaattgatggcgtagaagacttatctcgtgctttagagaaagatgttgctgtagtagtactttcccatgtgaattaccgcactggttatttttatgatatggcaactattaatgaacaaattcactctaaagatgctttggtgatttgggatttatgccactcagtcggtgcggttcctatgcaccttaatcaaactgatagtgattttgcgattggttgtacctataaatatttaaatggtggccctggttctcctgcattgctctgggtcaatgaaaagcatcgtgatcagttctggcagcctttatctggttggtggagtcataaaaaaccatttgatatggcacagcattatgagccagcgaatagtatccgccgatatttatgtgggactcagccggttatttctatgagtctgattgaatgcggagtagatattttcctgcatgccgatatgcaaaaaatccgtgagaaatcgttgaaattaacagatttatttattcaattggtacatcaagaatgttctgaattcggatttgagttaattacgcctttagatcataaccatcgtggtagtcatgttagttatcgtcatgaattcggttatgaaattattcaggcacttattgcacgcggtgtgattggtgattatcgggaacctgcagtcttgagatttggtattacacctttgtatctgggctttgaagatatttggaatgcagtacagcacttaaaagaaaccatgctgaatagtgaatggaaaaacaaacagtatttagttcgtggtgaagtgacctgattttaaggaatcaaaataaaacaaatggctaggagggcctatgagtagttttgatgaaatacaaaatagagaagctgggctgcataaaaagttatctgcaaaacagatggggatgattgcgattggtggagcaattggaaccggattgtttatgggaagtaaatttgcaattagttttgcaggtcccgcagtcatcgtcagctatgcgattggtggtttaattgcttttgcacttatggcttgtttggctgaaatgacagttcagcatcctacttcaggttcatttggtgcatatgcagaacattatataagtccacttgctggcttcttggttcgctactgttactgggcttgtattgtgctggctgtaggtacagagattaccgccgttgctgattatatgaagctctggttcccgaatgtaggctcttgggtctggattggatttttttcactgaccttacttgttgtaaatgcctatagtgttaaagcttttggactagtggaatactggttttccacaattaaagtttttgccattattgtgtttattcttttgtctattggtatcttgacgcaaagcaatcagggaatgacgcaagttgtaactcatttatcaggacatgggggcttttttccaaatggttttagtggggtatggattggtgtcattatttcaatatttagttatttaagtatagaaatgattgctgtcgcggctggcgaagctaaagacccggaaaaggcagttaaaaaagcattcaaaagcacagcacttcgactcattttgttttatttattgtccttattcctaatcgttactttggtgccgtggactgttttgattggagcagatgcaacaagcccttttgttatggtcatgaagattgtcggtatcccgtatgcggatagcattttaaactttattgtaattgtagctgccttatcagccatgaatagcatgctttatatttcaactcgtatgctgtttagcttgtcacgtgcaggtgatgccccaaaagtctttggtcgaattagtagtaatggtgtaccggtaaatgcgctgttgttatctgcggtagggattggtattgctagtattgtttatacgattaatccagcttccgcatttccaattatgattgcgctatccatgtttggtgcgttgttcacgtggggaagtatatttgtgactcatatgttttttagaagacatatggttcagcaaaatatacaactaaaatttaaaattcctgctagtcgatttatctctttgtttgggtttattgcgattttaagcattacagtgactacctggtttaccagtgaatttaagtctactttacaatttggcgtacctttagtgcttgttcttatatttttctattatttgaaacgttctaccgtaaagttaaatctcaactctagtgaagaaacattgaagtgactggtatatgagaaagtatgacaatgctacaacggtagagaatgaaggtgaaatactagcaggcttccaatacagaagcttgctgagttatcaggcttattatcatataaaagatataaagtatggttcgaagaaccgatcaactctggatttttttcctctagaacatgtcagtaaaaccgtaatttttatacatgggggatattggcagtggtgtgataaatcggactttgcctttatagcgccgtacatattagcaaaaggagcgcagtgtgtacttttagaatatgacttggctcctcaaagtcatatttcacaaatcgttgctcaaactcaacaagcgctcgattttatcgctaaacaaaattggaaaataggcgaagtagtagtggtcggccattcagcaggtgctcatcttggtgctttatgtttaaaccatccgttattatccaaggcaactttattaagtgggatttatgatttattacctatacaagagactcatttaaatcacgctttaaacttatcgcaagaggatattttgaaatatagtcctattcatcagcaggaacagatcaatattccttgtacgattttgtgtggtgggttagaacttagtgaattaaaatggcaaagtcaaaattattttgagtaccgacttagtcaaggtgaggatatgatttcttttgaaattattcctgagattaaccattactctattttagagcactattttaaatttatatttaagtgagaaattaagtttgagttagccttggtaaacatagggtaagttgatttaaatattatagaaacaataggtggggggaaaatcatgaaaagctatcttatttataatattaagttcagctaataaaatatttcagtacaagagcaatcagtatgataaataaccaagttgaacaacatataaatttatatattgttttattaaatttaaataaatatattgatttttgcttaatcaacaaggaaatgtagagtgcgtcacacttctttgagttttttattgctgtatactattttaagttgacctaaactaatatctcgattagattaaaaagatagtgttttctctctaatcgacaaactgtttagctgttgcttagatgagtttatagtccgtagcttcccaagatgcggacttttttatttttgtacaattcgttaatggtacaaagattcgcgcattaaaaagacagttaatagtaaattcggttcaattcaagtgaaaaacttaaagaagtattgtaaatatatctttaaaggtatatatttatatatgcatatactgcgtctgtaaagttgtttgttttttaatacccacatatttttaagatatgtgggtattttttattaaaaatgtttatttaaaaaatatttttaaactggctaagttttatataaggggtttattttagttagataagaaaattcaaataatttgttttgcataatttatttctaataagttaattaataaaaaataggaaatatatatttatacatttattgtacatattaatcacagttaaagaaattgttaattttttatagttgtatgaacttttatattttgaaataattgtctataacctgttaattatcatattgttatggatattttgaagtttctaagaagttttaatactgttggtacttacttagcaatggctactatagttcttatcataatggttattttcttttatattattgaacccaaatagagtgatattttaattataaaaaaataaaatatttaaattataagtagatggatgtcacatttttctataaaaaagtggattgatattgtttaacctaaaaaattatgaaaatatggttggggtttaaaagcagataaaactcctcaaagttctcatctaaaattttaatcctgaagtaaaaagttattaattatcataaaaatacctgaaatataatatatggagatagtcatgaatattcgccaagtgtctgctatttgtctttcaatagcagctactcattttgtgtatgccgcttcaaatgttgcaaatcctgtaaatgattcttcccaaacaaaaggaattattaaaaatcaatatattgttatattaaataaggatgcaggtccttctaaagatttcgcacaaaatattgctaaacaacatgctggtaaagttttacaaagctacgatactgttcttaaaggttttgcaatttatttacctgatacagcagggacagcctttattgaagcgatgaaaaagaaccctcaagttctttcagtagaaagcgatacaatagtaaatattgatgcaactactcaaagtaatccagattggggactagatcgtatagaccagaaagctttaccattaaattcggcttattcttatttacagacgggttcaggtactacggcttatatcgtggatactggtatattgtctagtcaccaagagttttcaggacgtgtgttaagcggttataccgcaatatctgatggcaatggtacaaccgactgtaatggacatgggacccatgttgctggaacagtaggtggtacgacctatggtgttgctaaaaatgtcaatttagttcctatccggattttggggtgtgatgggtcaggggcctcaagtaatgttattgctggtttagactggatattaaaaaatggtaaaaaacctgcagttgtaaatatgtctttaggtggggcaacaagttcttctttagatagtgcagtggaaaatttatataataatggttatgtcatggtcgtagccgctggcaattcaaatacagatgcatgtacatcttctccagcaagagtaagtaaggccattacagtggctgcgacagataataccgatactcgggcaagctattctaattatggaagctgtgttgatatttttgcaccgggtagccaaattaattcttcttggattggaagtaatacagctaccaagatattaaatggtacttcaatggcaactccgcatgttgctggtgtagttgctgaaatgcttcaaagtacacctacggcttcacctcaaacgatctctaccaatcttttaaatcaagcgagcagtaacgtagtaaaaaacccttcaggtagcccaaaccgcttgttatataaatctccttaataaaaatataattctctatgattgaaaaggtcccgaaggacctttttttaaatttttgcatgtgtaccatacttgtcaatcatgattgaactggcttcatttaaaccacgtacagtaacttgtatgccattcttttggaacttttctactgctgaatcaagcattgcaaccgaagtgacatcccaaatatgtgaatgagtcagatcaataatgacttcttttacttcctctttaaagttaaagctttgcatgaatctatctgaagaactaaaaaagatttgtcctcttaaatcatataaacgagcgttgccttctaatgaacttattacctgtatatcattttcaagtttattggctaagaaaagtgcggaaagtagtacacccgtcaatacgcctaatgctagattgtgagtagctacaactacaacaaccgttgcaatcataacggtattgctacttttaggattagttttaaattgggtaagcgaacgccactcaaaagtacttattgataccataatcatgacagcaacaagcgcagccataggaataactttcaaccaatcacttaaaaatactactaaaatcagcaagaatatgcctgcgcataaagtagataagcgtgtgcgaccacctgatttaacattaatcattgattgcccaatcatggcacatccagccatcccacccataaaaccagaggcaatattggcaataccttgacctttacattccttaaatttattactcgggctatccgtcatttcatcaacaattgtggctgtcatcatcgactcaagtaagccaactgcagctaacgccaatgaataaggaagaatgataagaagtgtatctaaattaagaggaatatctggaattaaaaaaataggtagagtatttggtaatgctcccatatcgccaactgttcgcacatcaaggcctaaaaagaaggcaagtaatgtgattataacaatacatataaggggagatggaaaaatttttccaagctttggtacataagggaatagataaataattgctaaaccaatagcgactaatagatagacgtaccaacttacattgactagttctggaagctgggccataaaaatgagtatggcgagagcatttacaaaaccaatcacaaccgatttagagacaaagcgcatgagcttagcaagcttaagataccctactataatttgtatgacacccgtcaaaatagtagctgcgaataaatactgaagaccatgttctttcactagggttgtcatgactaaggccatagcacccgttgctgccgaaatcatggcaggacggccacctacaaaagaaataataaccgcaatacaaaaagacgcatataaaccgatttggggatctacacctgcaataattgaaaaggcaatcgcctctggaattaaagccagaccaacaacaagcccagaaagaatatctgcacggacattagagaaccattgttctcgaagattcgttaacatggaaatagcctagaattttaaattttagaaaggctagtgatgtgatataccaacacacaagcgactacaccacatcactagacagtgatgagttatttacaaaggagaagggtaaataaacttaaggtggcgtaagtgtcatggataatgaaaatttgaagttttaaagaggtgcgaaggataacataagtttttagggggagccatttaagcttgctactttcacttattaggcatctaactattttttgatttgttcatttctgctttaggcagagacgtaaattcatttaatggcatatctaagaaaaagtcaggagcgtcagtgtgtttgcaatttaaccaatcgtttctaagatggtcaggtattacaataattgaacgtttttcatcgtcaggtttatgaaactgcttcataaacgaatgtcgatctgcattgattgttaacagcgacattgttctaactttctgctcatcaattatggtttcttcataaattgctgcaagcgtaaatggcttcccatcttgacgaaagatgccataccaatgtgctttaccattgatatatttcggttcataaatagcttcaacaggaactaggccaaattgatcatttgaccaggcatgtttaaatgaacgtttgtgatcaaccgtttcagttcttgcattataagttgcatatttaaatgaaacttctttcgcatatggtggcaacattccaaatttaacttttcgccattcccattcattttgatgagataagattattgggcaatcatcacttggatagacatctgatttgtaatcaaaggtgggttcaagtaagtctaattgataagaatgctctttcttaaggggtttaaaatttgcacacataacgaaattcgatttgtaaggatccttaacctttagcttggatcttttaactatgtggtatgtatatttttatagattgaattgtctatttgagtattaaattttacttttcaattactttgttaaagctttctttcaaattatttatcttaaaaatgagatcaatgatttataaggcaacttataagatattcatttgttttgaatagctacttttatgcaacagagccttgcagaaatttggattttaataaatgagctaatcatcataatacaaaagatatagagaacgtatacaaaccaatattttcagcggtttaagtaactctttagaaaactttataaggtggaactatgaataaacatttattagcaaaaatcactcttttaggtgctgcacaactatttacgtttcatacggcatttgcagatatacctctgacacctgctcagttcgcaaaagcgaaaacagaaaattttgataaaaaagtgattctgtccaatttaaataaaccacatgctttgttatgggggccagataatcaaatttggttaaccgaacgtgcaactggcaaaattttaagagtaaatcctgaatctggtagcgcgaaaacagtatttcaggttcctgaaattgtgagtgatgctgatgggcaaaatggtttgttaggctttgcttttcatcctgactttaaacataacccttatatctatatttcaggcacttttaaaaatccaaaatctacagataaagagttacctaatcagacgattattcgtagatatacctataacaaaactacagatacatttgaaaagcctattgatttgattgcaggtttaccgtcatcaaaagaccatcagtctggtcgtcttgtcattggtccagaccaaaaaatctactatacgattggtgaccaaggccgtaatcagttagcttatctgttcttaccaaatcaggcacagcatactccgactcagcaagagctcaatagtaaagactaccatacatatatgggtaaagtattacgcttaaatctggacggaagtattcctaaagacaacccaagctttaacggggtagtgagtcatatctacactttagggcatcgtaatccacaaggtttagcttttgctccaaatggaaagcttttacaatctgagcaagggccaaattctgatgatgaaattaaccttgtattaaaaggtggtaactatggctggccaaatgtagctggttataaagatgacagtggttatgcctatgcaaactattcggcagcaaccaataaatcacaaattaaagatttagctcaaaacgggataaaagtagcaacaggtgttcctgtgactaaagagtctgaatggactggtaaaaactttgtgccgcctttgaaaactttatatacggtacaagatacctataactataatgaccctacttgtggtgagatggcatatatttgctggccaacggttgctccgtcatcggcatatgtatatacgggaggcaaaaaagcgattccagggtgggaaaatacattattggtcccatctttaaaacgtggggtgattttccgtattaaattggatccgacatatagcacgactttggatgatgctatcccaatgtttaaaagcaataaccgttatcgtgatgtcatcgctagtccagaaggtaataccttatatgtgctgactgatacagcggggaatgtgcaaaaagatgatggttcagtcactcataatttagagaatcccggttctctcattaaatttacatataacggtaagtaacttatttcaaaaaacccagctatatagctgggttttttatataaaggtttatatttattcagttacgaccaatactggcacatgaatttctcctaacagtgcttgagttacacttcctaagaagaactttttaaaaccttttcgcccatgagaaccaatcactaataaatcagcttttagctcagttgctgctttgatgatttctgtatgaattgtttgaccttcaacaattttggtttcaacagaaattccatgttggctaaattgttctttagcttgatctaaaatgctctgaatcgaagctctcgctttattaaaataatcttgcgcaatttctgtactatcaataatttcaactgaaataaatggatcaatagtgagtgcatataccaaagtaactttactactaaaggctttagcaagacttgcagcatgattaaccgcaataagtgaagtaggagaaccatcgaccggaactaaaatatggtgataactcatatattgctccttattgtcttgtgacaatatttattgttgaagaacctaaacttgttatcgttatggttatattatcgccaattttataatttttattgtttgtttttagtgtgtaaggtaaatgactaattcatagaatagtgactttctagataagcctgaccctgtttaagaatagagatcacctgattagcatcaatagctgattcaaataaaaaaccttgccctatgttgtatccaaattgaagaagtaattcttcttgttctggtgtttcaataccttctgcaattaatccgagtgagagatttggagcaagtaagccaattgcctgaacaattgcataaatggatggatcatgttgcatcttttgtataaagctacaatcaacttttaagcaatcaataggatagtctcttatatgtgttaaagaagagaaacctgttccgaagtcatctaaagcaatgcgtactccatgctgttttagtttattgagtgcgcgaatcacatattcagaaccacggtcacccagcatatgttcagtaacttctatctcaattaaatgggtaggaatttcaagttgattaatcttttttaataaacgttcagcataattatctcttaagaactcaactggtgcggcatttagagaaacaggaagcggcacaaaacctaattttatccatttagcaatatcatgcaaaacttgttgttgcatgatttcaccaattttactggctaaatcgtagtctttaaaagcttcagcaatctgagaaggcaaacctctttgggccgaagtcgtatgccagcggagtaatgcttcaaagcccactacagcatgagtttttagatcgactttgggttgatagtagggctgaatggtatgatgacgaataagctggcgagcaatgttgagttgagaggcgattgcctcggttaactgcatcatacttgggttatacatacgtatgccgccacgaccacgggcttttaagtcatgtaatgccatatcggcacaacttaataagctcgattgatcaactgcatcttgagggtaaatggcgcagccgatgctcatgccgccgttgagcacattcccagcatatgtaatgggttgattgagttgttgaagcaatacttcagcaagttcacgaacatcattctcattttccaaatggctaacaataactgcaaactcatcaccacctaatctggcaactgaacatctttcagggtctacgcactgattaaaacgtttagaaagtatttttaataagtggtcaccagcactatgacctatagtgtcattaatatgcttgaaatgatctagatcaattaaaagtagccctacactggtttgggtttctcttgagtaagctagggtgcgttttagttgtagcttaaatgaacgtctattaaataaacctgtgagttcatctctctcgctaatatctcttaatcggttttcagtaagatactgttgagtgacatttcgcgaaacacacaatatctgaataatttcgccgtttgtatgttgaattggggtaagcatgttatcccaatattctggatcttgatttggtaagcaactcatgccagcgaatcgggccactttaccctgtaaggctttttttaaggcaattcttccgcgtttacgaatatgggggggtaaaagatctaaccatcgcataccgaattttttttcatctacaggtatacctaatgcaaggcatcctgatttattcatatgagatacagtgccatctgtatttaaaaccttaatacaatcgacactgatatcgagcatttgattttgtatatcgatatcttttcgtaagctttgctgctcttgtatatcttggtcaatatctagaaaactaataaaccattcattttcttgagaagattcatggtatttcgacaattgaatagaaattttacaccatcgataataatgggttttatgcaaaagacggcatttaaattcaattcttgatcggaaccgtatcgcatctaaccatttgtttttaacttcttctaaatcggcagggtacacgaaatctagccattgttgaaacaatggaggagaagtatcgcgccagtattttgtacactccgtattgcagtataaaattaagcctttttcatcactgacccaagtcggtaaaggaaactgctcaacaataaagtgcttttgggtagtgttcgacattgaagtcataacatgcctaaaactgctgaagagttaaactatttataaactgtattgtaatagttgtgtcgtcaccacaaaagctataaaaaattaatatttgatgtttttttcgtctcgagtaaaggtttcttttaaataaaaattttattaatcatctatgcatatgttatttattaacttttaatctcctaaagattatgaaatgtagaattttaacttgaaaaaattatgcgtatttttgtaaaaaacatgttaaaacagttgtttataagattcaaatagggttttttataaaaaactcatacatcaaaaacattttaaatcgtgaagagttaattaatttaaatatttatgagaaaaaatttaaaaagaaaaaagcatttaagttattagaggttaatacaataaatactattaactttacaaaagtaatataaaataaggtcttatattatcgtaaaattcttttcatcaaaaaggatatataattcctttttgtgcattttatagcctacattttccccaagatgtaggttttttttatgtaaaaattttattattttaattttatttaacttattaaattataaataaaaaaagccatggaggctttttatacggtttccggctttttcaactgttgttgaatgtagaggttcatataatactgctctatataatcgtcagcataattgttagctaatgtcttagtagctacctgttcatgcttgctgtaacagttagtttctaaatctttttcaagtacccaccattgacggttaatacgacgtacttgaaacttatcactcttatattttcttttagccattttttcctaaaattacgttagagatattaagagagagtttctactggagttgaaggaacaagtcaacaagcatagtgtttaattgattactttatgaagtctatattcctgtaaacattagagaaaataataaaaaagctctcatgagagagcttgagaattaatcgttttaaaatgttgaaaacaacaattatcgagaaagattttttaaaagcaattttaagctttccatcattttttctagttgaagaggggtgataccttcgaatgattgttcaagtactacactcgttagatcattaattttattaatcatttctgtaccacgttcggtaagatatacacgtgtaatacgaccatctgattgacaagaataggtttcaactaagccttcatcttttaagcgataaacaattttagtggtagtcgacatttttgaaataatcatatcagatagttctgatacgctagcgtgaggtttactacttagcgcaagcataatacgtcgacgtgaattatctaggccatattttttgagggcattatcaatattttgaacatattgagcatggacctgagtaatccaataatatggaaaatcttcaagagtgaaagattctgttgtaggtaaaaaacgcgcatacttctttgtcattgacttttccccataccttggtggatcgcattttatgaaacttattttaatagtggaaaaatatagtttcactaagcaagttatatcaggactttaagtcatgagcaaaatttatattgtttgattaacaaggacaaactataaattttcctcttctaataaaacttattccttaccgtttatttgaacttggctactcgcttggtcgtaaaatgaacgatatttgttagcatgagaatcgtagaaaaaaaaactcgttttgaacgtgacatttctatcaaaattttttgtctacaaagtcataacttaaaaaaataaatccattcaataggtaaatatttaaattaatcatatgtttaattgattttttgaagatgaaaatttaccatacatttaacatgattgatcaaatattaaagaaaattaactaataaatggatttatattattgaatttactaaatttttaaatattaattttactgttcaaaagaatcatgatttacgaatgtattttaattaaggaattgtttaattgttgatcttttgaattgtatgttaattgttattttttatttattttaatgtagtgcattttcaaataacgatagataaattcttctggattaatgatgaaaaaattactaattacttctatggtagctttaacgatagggttaaatggctgtgcaagcatcattacaggttcttcacaaacacttacttttacaagtgtgcctgagtcagcaactattgagattaaaaatcgtaatggggtaaaagtccatacggggcaaacacctgctaccgttagcttaaaaaaggtgccggttatttcaaaccagaaagttatcaagtatctttcagtaaacctggttatcaaactaaaacggtagaagttacaggtactcttagtggctggtatttaggtaatattatttttggcggtttaattgggcttttaattgtggatccagctactggagcaatgtataagttggcaccaaaagatataaatacagtattagaagctcaaaatttagtaggagaagctaagcaaaagcccacgctaacagtgatgctggctcaagatattcctgagcaaatgatggcccgtgcagtacaaattaataaataaaaaatagtaataaaaaagggagaatttatattctccctttttaaattatgagtttgttaataatttttcttcttgattctttttaatgatggcataacttactcccgttacgatacttccagccgcaattgctgcaagatacaaccacgcatgattgattgcatttggaatcagtaatacaaatacaccgccgtgtggagtcacaagctcacagtgaaataaagcaactaatgcaccagttactgtgccacctagaatacaggttggaataacgcgcattggatcttttgctgcaaatggaattgcaccttctgaaataaagcataaaccaagcacaaatgcagctttacctgcatctttttcaccagtactaaatttatttctagcgaggaaagttgcaattgccatcccaattgcaggaaccataccgcctgccatcgtggctgccattggcatataggtattggtagtaagtagtccgactgtaaaagcataagcagctttattgattggtccgcccaaatcaatacacatcatacttgccagaataattcccattaatacagcatttgttgtgcccatattgttgaggaaatctttcattaactcaaaaatatgcgctacaggttgacctaccacatagaacataatcagcccaacagataatgttcctaataatggaataatcaaaatgggcttaagagactctaaactagttgggagcttaacttttttagctataaataacgcgatataacctgcaaggaaaccagaaacaataccgcctaaaaaacctgcttgtaactgtgctgccaataatcccccgattaaacctggtgcaagaccagggcgatctgcaatcgaatatgcaatataacccgacagcatgggtaccatgagggtaaatgctgctgcgccaatctgttttaatatggctggcagactaccagcttgttccgctgcatttaggccaaaacataaagaaagtgcaattagcaagccacccgcaacaaccataggcagcatataagaaacaccagttaataagtgtttatatacaccaactttttcagttttatccttattttcagttgttgcttgctgtttaccttgttctaaaacctgagcattagcaattgcctcagcaaaagccttgtcggtttgttttaaagcaaaaccagtgctacatctatagacacgcttacctataaagcggtcagtgttgacttcaatgtcagtagcaagaataacaatatcggcatcagcaatcgcttgaggtgataaaatattcttcgcacctacagaaccttgagtttctacatcgatttgatacccaagtctttctgcaccttgttgtaacgcttcagctgccataaatgtatgggcaactccagttgggcaagcagtaatggcaacaaaatgagttgcggtatttgaagcttgcttaggtttttgttcccactcatttgctggttttgagtgttcaagtgccgttaaaagtgctttgtctgcatcatctttaatatcttcaatagaaactaaagataaagcgttttgaccaaaaatatttagatttttaggttgctgtccaataataatgacatgatcaaaatgatcgcttgattcaaactcatcgagtgaaatgacactatgtttataaccgtgttgggttgcgactaaagcaagtttacgagccaagattaaagcattgacttgctgttgcggaccattagtgacaaataataaatgtttagcagtttgcatcagattcactcaatgaattgataatagtttgtgcttttaattggtttagaacctcagaagtagggattcgaaaaccaatttgtgttacagcatggcttgcaatggctgtcgcagtttttaaggtctcttcaggaggcagttggttaacaagcccatggatcatgccggctaagagtgaatcaccagcgcctactgtactttttacgataacttttggtgcttgagcatgtaaggggtgagtggcgtgtaaccaatttacgccatcttcacccattgagataaccacatgctcaatattggttaagctatcaaaaagttctctttgttcagcatagcttgttgctggacgttgataactttcaaccaactcatcggtattcggtttgatcatccaaggttgacattcaattgcagcaaccaatgctttaccactggtatctagggcaactttcttattattttttttgatcagttgaataagttgttgtaactcatcaatactaaaaccttgcgggaggctaccagctattgcaacaacctcgacttgtggtaacagagcttcaatcttattaaatagcctttgtttgtctgtttcagaaacaaaaaaacctttgccatttaaatctgtcatccgcccagaatgctcagcaatttttatattttgacgtgtttcaccatcaatataaataaactcaggttgaaattgagcttgtgcaaaatgtgtatcgaaaatttgtcgattatgctcacctaaaaagccggttacgattacatcatgacctaagtcttttaatacttgagcaacattaaggcctttgccagccgcatgaatttctaccgactcttgtcgattcacttctcctactagtaactcatccagttgaatggttacatcaattgcagggtttaaagtaattgttaaaattttagccattactattcccaatcttataagtcttgttcagatagctggcgcacagcaggggcgctatcgcatagtaaagcttgttgcgcaagcttttgagcatggctatagcttagtgtgcggatttgagcttttactaaaggaatgctatttggggacatactcagttcgtctacgcctaatcccatgagaatagggacagctttcgggtctgctgcaagctcaccacagattcctacccatttgccatgtttgtgggcagctttcactgtttgatcaatcaaattaagaatacttggatgtaatccgtctgcttccgctgagagtattgggtggcctcggtcaatcgctaacgtatattgggtcaggtcatttgtgccgatactgaaaaagtcgacttcttgtgcaagaaccggtgcaagtaaagcagcagacggaacctcaatcataatgccaacttgtaaattgccacatggatgttgggctcttacttcgtcaagaattgctttggcagcacgccattcttcaacgcgtccaatcatagggaacataattcgtaacggacgattatcagatgcttttagtagagcggttaattgctgttttaaaagttcagggcgtcttaaagttaaacggattcctcttaaacctaagaatgggttttcttcttcagcaattggtaagtaaggtaaaggtttatcaccacctacgtctaatgtacgtaccacaagcgggcgacctgcaagtgcatctaatacaactcggtaatcagcttcttgaacagcctcattaggtgcactgctatgagacataaaaacaagttcggttctaagtaggccaattgcttcagcaccacattctactgcttgtgctgtcgcttgaactttacccaaattggctgcaatttcgatttggtgttgatctaaggtaattgctggctcgtggctatgacgttcagcttcttcacgaatttgacgctgttgctcacgctcttgcttggcttgttcgatttgtgcaacatctggatctaaaacaaaagttcccgtatcaccattaataagtaaagtgcttttcggatcaatttctaggacttgttcaccagcaccaacaatagcgggaatgcctaaagcacgtgcgacaattgcactatgcgcacttgcaccacctatagcagttagaatacctgcgacacggtctttgttgagacgagcgacatcacttggcccaacgtcatgcatgattagaatataaggctctttaggctcttcaataaccacttcaccacataattgggttaaaactctgtcgccaatgtcacgtaggtctgttgcgcgttcagcgagtaaacgatctggtagagcttcctgtgctttagctgcagcttcaatatgttcatgccacgcagctggtgctgataaattttgataaattttttgatatacaccattaattaaatcaggatcatcaagcatttctaggtgagctcgaaagatttgtttaatttcagaggcatcagctttggctatgacttggtgaatattgttttttactgcatgtagggcaatatctaaattttctttctcgacttttacgcctgaacccatacgttcatattgataaacctttggtttaatcacatggacaggtccaaaagctaagccacttgatgctgcaatgcccgtattgttacccaatgtcgtagcatttgatattaccgtttgagcagggagctggtcaggtgtttcactggttacaggtagcgcttcaacttcttcacctaagccttgctgcactgccaaaataacttgatctaaagcctctacggcatcggtttctggctcagcgataaaacgtagagtttggccacgcttacaacctaacgctaaaagacgagttaaacttttggcagaaacaaagctaccatcgtctactgcaacttggatgtcgccttgaaaggtttttgtaagattgacaaggtgtgtagctggtcgggcatgtaagccgtgtgcatttgccagtactactgaacgttgaggccagtcaggaacaacgtcagctccaataatttttgcaatttcgtttggtgtttgagttttatctagctcggcaacttgctcagggttaaataaaatatcaattaaacgattaaatctttcattatcgagttggtcattggctgctatacaaacgagggtgttcagctttttaccatttagctctaatgcctgtgatggtttagtaatgctaatagctggttgctgaacaaagtgatcgctagaaatggaccagatttgatcttgcagttgaatggcttgttctggatcaagtgaacttagaaaaccacattttacaaaattatgttttttgagtgtttgagaagctgcccaaaataaatcttcgatatcttgtgcatcgatttcggtttgaataagattttcatgaagcgctaaagataatggctgagcttgtagtaattcgataatctgctcaggtttagaagcattttttacttgttcgctgacgtcatgcattaatgcacgagtaagaatttgcaaaacttgcaaatgttcatcagattttgctgcaatcactacagctaaataaattttattttctccatcccagatcacgccttcggggaaatgggctaagcggatacctgtttttaaaatatattcacgtgattgaggagtaccgtgaggaatggcaatgccttggcctaaataagtcgcgctttgttgttcacgattgatgagtcccgttatatattcaggcgtaactaacccatctttttctaatatatctactagacactttaatgcatgtgttttatcaacagcatgttgattcatatgaatatgttgaggctctagtgctagcataattatccttgaacaatttctttggctttagctaaaacagaaaaaaagaagctgtttgcattaaacaagtaaatatacctgttttttgacaacagcttcagatgaattaccttagcagaactttaacggtatatcgacgcatttaagtaaaaagctgctcgtttttaatacaaaaaaacctctaagccggattactgacttagaggcgaaaataaaagcagtgattaatgtttaatttcttgttctaaaatagaccaaagtttttgatgtgattttttaaataacagcatatggccaattgatttatagcctaaatcttttgggctaagttcaatcatttttttattcgcatttggatataaacttaataattcttgtacgttacgtttggttgcaatctcatcatcatcagcccaaatagcagtaattggacattgaatatctgaatgaaaatcatgaaaaatcgtcttacctatggcattttttacatatccgggacggctataaaactctcgccattgttgagcaacttttttaggtaggttttctcccataccaatgaattgagttgctccataacctttaacaatactagaaatagggaagataagattaaacataactggcgctaaaaccttggtttttcctttaaggcctttaatatgtccagttgaacctgcaaccgttatcacttttgcgactttattatagttaggtacgactcctagtagttgtccgccagcactatgtccaataagaataacttgatttgctttcgtttttattaataaagcatcaattgcagcaggaatatcaagtgttccccagtcggtaatacttgcggtactttgttttaaggctccatgtagggactcgccaataccacggaagtcaaaactcaatacatcatagccttgttggcttaaccatgttgcgaaagagtgataaaagtttttagttatacctgttgctgggcaaatcaggatagggtactcagctttcttttcttgagcaggataaaattgagctgcaagctgataaccatctttacaggttatccaaaaagattcaaaagtcttatccatagatttaaagttaattggctaatcatttatcttaatgtacatgagttctgaaaaggtacttgattaaaatgtgactataaagtcaagatttatgttatatagctcatcaaatcttgataaaacgaataatggaaattatggatttatcgaaagctgtacagctggctattgtctttagtggcgtctttttatggataggaatgttaactggagtatggaaatattggcaaatacgccgttccgaattaagccgtgcacattattatgtagatattgcacatagaagcagtttgctttatgcagcagccacacttattctggctgtattgagctatttcacgattttaaatgaagatattgctttatggtgtgtattggcaaatatactgttttttagtttctcaattttagtttatatcatccacggatttttgcaggatacgaccaatcagtttaaacaacctcataggttagggcatttcagtttacctgcatggttgatgacatttatgatgttcgctttaattattactgagctgttagcaactgctattttagtgatggggacaattttattgtttttaagcaaataaaaatggatgatcgctcatccatttttagaattcttatttctgttgactaagtcgtcttttagctaattttcgcattttgtggtcgacaaaggcccatacacaaaatacaaaagaaacaaccatggcatacataaagtattcgggtttcagattccctttaatcataccttgaaacagtaaagtcagcataagagcaagcgtcgttactccataaacaactgaatctttgctgttcagagtgttaatgaagacttgtttgttgaaatgtaatgataacatctccatccctccttgtggttgcgctaaaaccgaatgttttagtcaagaataagtttaatgttgtacttgtatttttagcttaattcaatagtcaatagaaaattttttgaacagttttataaaaacttctatgtttataaatggttaaggtattaaaaaagtaaatattaaacatttttgtataaaataattacttttttagaaaagagaaattatttaaatgaaatgtgtaataatttctctgttctttaaatttgctttagctactttgtttttttaaaaaaacatcaatagcgtgttgagcaatttcagcatcttcaaaagattgaacacctgaaacaccaatcgcacctaaaatctggccttcataaataatcgcttttccgccttctagcatacctttagcacttggcatactcaagaaaccaagacgaccattttgaagaagctcttcgtaaaattttgaaggacgaccactcattgatgagcatttagctttttctaagcaaagatgtgtggtgagaggagaagcgccatctagacgtttcataagtaataaagagcttgtttcatcaacaatggctatactaactttaaagttgtgttcaattgcatatttctgagcttcttccattaaaaactcagcatctgctaatgttaaataatatttacttttcatttatgctcttctttcctgagtaagctaaaaattattttagtgtaatattacagtaaaaattaattatatctatagttgaattgtcactaaatgctgatgttagaaataaaatgccggttgggtaaacgcagcattttattcgatatataaaatcatgtttgggtaaaactcgatttcaaaaaaacatcagattaaatgcttttatgtttaactttgtcgataagagtagtcactacaagaacaactaaagatgggatcaaccatgccaagttttgttcatttaacggtaagtgttgaagaaaattagggaggtagtcaccaaagcctgcaactttaagcccgtcaataattccgaaaattaaagcaatgcttgttactgaaccgacaataaaagatggtttgtgccaaaatttccagaagaaactgagcataataactacaattgcaggtggataaattgcacttaaaactggtactgatacggcaattagcttagtcaatccaaggttggaaataatgaaagagaaaccaaccaagatgaaaactaaaagcttatatggcaacttagtaagttgagcgaaatattcagcacatgcacaagttaaaccaattgcagtaaccatacatgctaagaaaatgagacctgttaagaagagtgaacccatattcccaaaagcatgttgaacatatgcatgtaggattacagcaccatttgctgcattaggagcgacttcatgactacccaaacctaatttaaataagcttaagtaaactaaagtaagtcctacaccagaaataaggctggcaataattgcatacttggttactagcttgttgtcagtaacaccacgcgaatagatcgcttgaataatgacgataccaaatactaaggcacctaaagtatccatggtgagataaccatttacgaaaccttctgaaacaggagagttaacgtaatgattaattggagcaggaacataacccgcaggaatcataaccgctgcaatacctaaaattgctaaagcgataattttcagaggagctagaacatgtccaactgtgtctaaaagcttgttcggatataaagaaacgacagttacaaatgcgaagtaaattgcactataaattaaaaggctactgctagacgttccaaaataagatgagaaaccaatttcataagaaacagttgcggtgcgtggtgtagcaaataaagggccaactgatagataacaaactacagttaagatcagacttgcgatacgacctagcggtgaactaataatttcaatggaaccctgcatacgagagagggccataatggtaattacaggtaaaccaacggcagtaatcaaaaaacctatggcagctagccatacatgatcaccagcttgttgagcgacaatgggaggaaagataatattgccagccccaataaagagggcaaaggtcataaaacctaaggcaataatatctccggtacgaagctgttgcataaattaaatttaacaaaaaagaaagaattttagagcaaaagaaatcatgatcaagcgctattttatgtgaaaaagcttttttttaggccgtatcaatcatccagagatattaaaaatatcaactggttaagttatctacttgaaaactcattgaaagaaataaagaaaacattttttaggtctgaatttttaaagaaattgtgtaaaaatgaaaatataaatttctattatgaatgttgaatatttggacattaaaagctttccgcctatcctatatccattctacaatattctaaattaactaacatttttgtaggcgtggtaaaagcagtgtctacgaggataaaattgaatgagagcttctactgttacaattaaaactgaacaagatctagaaaaattaagagtttctgggcgtttggctgcacaagttttagaaatgataggggagtatgtcaagccaggcgtaacaactgaatatttagacaatatttgtaatgattacatcgtaaatactttaaaagttataccggctaatgtgggttatcatggattcacaaaaacaatatgtacttcagtcaatgaggtggtatgtcacggtatcccttctcaaaataaaattttaaaagatggcgatattattaatattgatgtagcaattattaaagacggctattttggtgatacgagccgtatgtactatgtcggtaacgtaaatccacatgctaaaaaattagttgaaactacttatgaagcaatggtcgctggtatacatgcagttaaaccaggggcgactttaggggatattggttacgctattcaatcggtcgctcatcgcgaaggatatagcattgttcgtgaatattgcgggcatggtattggtaaagtttatcatgaacaacctaatattctgcattatggacaacgcggccaaggtcttgttttgaaaaaagggatggtctttacaattgaacctatggttaatgcaggcaaacctcaggtaaaagagctaaatgacggctggaccgtaattacccaagatcattcgttatctgctcaatgggaacatatggttgctgttacagatacaggatttgaattattaacgccgtggcccgaaggtgtgggaaattatccagaaatttaatatgcataaaaaaagttcgataatctatcgaacttttttatgtggctttgatttatggatgttctgaaagatgttctaccaaataatcaataaatacacgtacagctggcagtaaacctcttcgtgacggataaacagcatggaatataccgtgggctgctttccaatctggcaagatttgtacaagttgacctgattttacaaaatcctcagctgctgtgtcaggtagcaaggcaataccacaattttgacttgcaagttgggcaagcatataaatatttgttcccatgatagttgggctaactttcactttcttcagttggttgtctgggccatgtaatataaattgttgatctaaatgttcttcagacaagcttaaaatacgatgatcacttaactcatcaggtgacttaatattaccaaactcatttaaataagcttggcttgcaaagagactttgttctatgagtgcaaactgtcttagtaccagactagggtcatcatctagtttagatctgactcgtagagcaatatcaatcccttcattaattacatcaacgcgtcgattacttacaataagttgtaatcgaatttcaggatatttttttaaaaatgctggcaaaattttgggtagctggttttgtgctatatctacaggaacgcttactttgactacacctcttggttgaatacttaagtgatcaaccaaatcatgagctgcttgtgcggcattcatcatgacttgggcgtgtctataaatatccataccaatatcggtaactgcaaaatgacgagaactgcgctgaattaagcgaacccctaaattttcctctaagttataaacacgacgacttaattttgattttggaatatccgtaacacgttcggcggcactaaatccaccatgctcaacaacaagggcaaaacaataaaaatcatcaagatctgtgagcattaaaatatcctatttatgcaacactaaagattttacattattacttttgcaacgataaagtttgattttaattttttgtaaaaagcttattaataaaccttaaaagagatgtttagatgatttgaaatttcattgtaattacatttaaattattttgtaatttaatttcttaaattaatagacaaatatggcgcttataagctaattctcctaaaatatatttttctcgattttttaaataatatgtcttaccagttagttgaattagagaacgcaaccgctaatattatttgcccgatttgtaagcttgccgttattgattggacacaagagcaatatgttcaaccttgtgaacatacagtatttattgcaatggacttaggatttgagtttgttgctgaccgttttgaagaagttatgaatcaaaacgtagatgagttacatgaagatccgaacataaatatttttgatgcaataacgactacaccatataaaaatttaactattttaaaagcagatcttggtgtagatgggctatttcgttatgtcggtataagtgattgttaaatttataagtataaaaaagcaatcaaagccaatctttcgattggcttttttattattaagcttctggagctgcgctgtattgttcgattaatggttttaattcgccattttggaacatttcaagcatgatatcgctaccaccaataagctcgccgtttacccataattgtgggaaagtaggccagtttgcaatttttggtaaagttgcacgaatatcagggttttctaagatgttcacatatgcaaatggacgaccaatttgactgagcgcctctactgcacgtgcagagaaaccacattgtggaaactgtggagtgcctttcatgtaaagtaaaacgggatgcttcgcaatttgatcgcgaattaacgcttcagtatcacgtgcttgttcagtcataaatagatcctcaactaatcttgcagcattatagggggtgttcacatcgctttgcaaaccgccttgttgcttaaagttgcacagaatattcaatattttattgtataaaccgaagcgatagcaaaaagcagacgaaattttagataaatgaatgatgagacttttcatcagtgcaagtttttgtttatataaacccttcttaaaacctcatacagacagagttcgtgatgactgatattaccctagctccagtacaacctgatcaaccaacacatttaatggctacttatggtcgccaagcgatcagttttgttcgaggccgaggggcgtatctttatacacaagatggtacagaatatttagatgcactcactggtattgctgtatgtggtttagggcactctcatccagctattgcagaagccattgcagagcaagcagctacactcgtgcatacgagtaatttgtttgaaattccttggcaaactgcggctgctcaaaagcttgctgaagtttcaggtatggaagaaattttcttttcaaacagtggcgccgagtcaaatgaaggagcaattaaaattgctcgtaaatttggtactcaacaaggtataagcttgccaaagattattgttgctgagcagtcctttcatggtcgtactttggcgacactttctgcaacaggtaacaagaaagtacaagacggttttgcacctttagtggaaggctttattcgagtgccatttggtgatattgaagcgattcaagaggctgccttacagcatccagatatcgttgctattttaattgaaccaatccaaggtgaaggtggtattaatactgctccacaaggatttagctatttagaagaagttcgccaaatttgtaaccagcataactggttaatgatgctagatgaaattcaaactggtaatggtcgtactggtaaatactttgcgtatcaacatacgaatattattccggatgttttgaccacagcaaaaggtttgggtaatggttttccggtgggtgctgtaatgactcaaggtaaagcagtaggcttgttagggcctggcagtcatggttctacttatggtggtacagtattgggttctcgtgtggtttacacggtaattgatacgatccagaaggaaaatgcagtagagaatgcagcagtagtgggtaattatattgttgaccaattacgtgcccaattgtcggataagaatgtgcaagtacgtggtttcggtatgatgattggtatccaattacctaaagattgtgctgagctcgttgcgattgctcgtgatgaatacaaacttattattaacgttacggcaggttcggtggtgcgtttattaccgccaattaacatgacacaagctcaagctgatattttgctagagcgtttagtcgcattaattacgaattatctttaagtttaaaaacaataaaaatgggcgttaatcgcccatttttatttttgtatttagcctgaaatatattgctttaattgttcaatcaaaactttctggtcttccattgcggctttaaccaaatcaccaattgaaatgaaaccaaccaattttccattatctaatacaggtaagtgacgtaaatgacgatcggtcatgagctgtaaacattcttcaaccgtattatttaaacctaccgtgatcacttttgctgtcataatttcagctactgtagtgctataagatgagcgctccataagcgttacttttcgtgtgtaatcgcgttcagataatattccaacaacttgttcaccttctgctacgactaaagcaccaatacctttttcagccataatcgtaattgcttcgaggacagttgcttcgggtgaaattgtaaaaatggcttgttcagatttgttcttaattacttgtgcaacgatagtcatttcttctgtcctgttgttttatcattttgatttaaattagctcgatttttgaaaaatgcaaagacttgctagtcattcaaatataagttttatgttcaagcgttcaaaaagcacgctatattgggtagctcaaagaaactttaagctacctgccattttggatgattaaaaaagaaatgatgcatttgctgtgtagataacttcaacttgcgatgagatgagttaaataaagcaggagtgacttttaaccgtgttaaagtaggtaataaagattcatggaagtcttttggggtaatttttcttggcttgtaattgggccagtgagttttggcgtatcgatgtgcttgtactccatttagccagaacggaaaaataaaatcttcctgatctgatttaatggcccagccttcatcaaatagtccccacagaaccccgcagtacatcatggttcttaaaatataaatcttgatcatcaagtctttagaaaccggttgtagattacttaaactgttcattttaaatttaaaggttttcaacttgtcctgcttattataagagaaacacatgacatttcagtttaaacaggtgtcaaatcgtaaacaaatattgatgactagaaatatctatacaaataaatgctggataagggtgggactttctaagtcacgactgaagtggcgaagtaaggctttagataaataggtaattttggttttgtataggtataaaaaaacgccacctgagcaagacaaagcggctaaagctttggggaagcgcaagatgaacatagttatggttaatttatattgaactttttacaggtataaaaaaacgccacctgagcaagacaaagcggctaaagctttggcgaagcgcaagatgaacatagttatggttaatttatattgaattttttacagacataaaaaaacgccacctgagcaagacaaagcggctaaagctttggcgaagcgcaagataaatatagttatggttaatttatattgaactttttataggtataaaaaaaacgccacctaagtgacgtttctttatgcttgcatcgtggctagtttctgccagtattgtgctttcatggaatcacgttcaacacggaaaccttggtagtatagttctgctaagaacaaagcagctttaccgtgaccagcacgagcaacttcttctaactgtgcaactgcatcttggaaattcatttgagactgaattgtgttaaccgcagttgcgtatacatgttctaaatcatgatgagagatacgttgaatcatataaaactccttattgtaattatgattactttttctaaaggccactgcctttgaactaatttaacttagaattgttaaactaatattacaaattaatggatttgtcaaccattaagaagcatcaattagttcactattaggatacatgattaaacattattcacaaataattttgagtaaaatcaatatgagaataaaagacaaggagaataactatgacaaatactattgatggctttgtttttgataatcctcctaaagaggagcaaatcatagaacttgcccattaccatcgtaaattattagacgaagcaattttccatcaagaaatacatttaggggattattgtttagcacaaaggaaacgggttttcgactatgctcgtcaattagaccctaatcaaaaagcttggttctatcaagtttatgatggtgaacttagaaagattgcagatgaagatgaattgcacccagcagatgcagaagaaggtttaagtatttttgctatgctattagtattagttattattgctgcaattttatacttctctgtaattcgttccttaatgggctagcaattgtcatccagtaaggttaaagaataatagccttactggattttgaccttgtgctgaagtgcattgaaccctacactacattcattagaggtaggtcatgctcacattcaaagaaaattttcttaaattaaagtctgagttaaaggcagatcaatgttttaatctggttgtgattattatcattggctgtatttttatgctgtcttatttggcattactacgtcctgtgaattcagaacagtatcaacgaattgtgcaactttctcgacaggctacttatccaagaactcaagatatggccgagttgattatggctcaatcagaaattcatagagcagagtatttaaagttaatgcatgcttatcagtttgaacataatcatatcaagcaatatcctgcattagcgcaagaagatactcaataagtattgtctttatttcaaaaaggttttgcacgctattgaagcaggcaaaaatttgaatttatgctaaactttccgttttttaacacgctgcttttcaaggaatcggcatgcaacaacaatcgaatatgcaaaataaattcttgatagatgctgagatcggggatgacgatgtcacattgcctaatttacctgctatcgatgttcctatcgttgagtcacctgttaagcaagaagtaaaagctgaagaagttgtcgaggctgcaccttctacagaacctgagcaaccaaaatctggtttctttggacgaatgaaagaaggcttgagcaaaactcgccgtaatttcaccgatgggatggttaatatcttaattggtgggaaagaaattgatgatgagttgcttgaagaagtcgaagagcaattattagttgcagatattggtgttgatgcaacaaaaacgattattaccaacttaactgaacgtactgctcgtggtgatttgatctattcacattcactttataaagccttgcaagaagagttagttgctttgcttgctccacgtgtgaagcctttgcatattgaccctaataaatcaccttatgtgattttaatggttggggtaaatggtgttggaaaaacaacaacaattggtaaattagcgaagcgtttacaaggtgaaggcaaaaaagtgatgttggcggcaggtgatacattccgtgctgctgctactgaacaattgcaaatctggggtgagcgtaacgatattgctgtagttgctcaaggtcatggtgccgatagtgcatcagttatttttgatgcttttgaaagtgcgcgagctaaaggtattgatgtactgattgcagatactgcgggccgtttgcataacaaaagtaatttgatggaagagcttaagaaagttaagcgtgttatgcaaaaaattgatgcaacagcgcctcatgaaattatgttggttgtagatgcgggtactgggcaaaatgcaatcaaccaagtacaagaatttgaccaggctgtcggtttaacaggtattaccattactaagttggatggtacagcaaaaggtggagtattatttaatattgctagtcgtactcatgtgccaattcgtttcattggtgtgggtgaaaaaattgatgatttaagaccattctcggcgaaatcgtttgttgcagcactatttgaaactgaaaaataattcttagccaagacttaagaaaaacctcacaaaatagtgaggtttttttatatccatatctttttttattgttgcgaaaataaaacgaactgtcatatttttaatgctgattataagaaatgagttccatagactatattcattcccaaacaacggcccctggtcaattaaataggtaggaaataaaaaatgtctactttcttagataaaattaaaaaccgtcgtactatttatgcaattggtaaaaatgttgcattagatcgcacaaaaattgaagaaactattcgtgaagcggttaaacatagcccatcagcgttcaactctcaatcttcacgtgttgttactctttatggtgaatcacatgctaaattttggaatttagttcgtgaagcattacgtaaaattgttcctgcagatgcctttgccggtacaaatgcaaagattgatagcttcgttgctggtgttggtacagtactattttatgaagatcaagctgttgttaaaagcttgcaagagcaatttgaattatatgcagataacttcccagtttggtctgaacattcaagtgcaattgctcagtttgcgacttggactgcgctttcagaacttggtttaggcgcatcgttacagcattataacccgattgttgatgctgatgctgctgaagcatttgatgttccagcaacttggaaattacgtgctcaacttgtatttggttctgttgaagcaccagctggtgaaaaagcatttattagcgatgaagatcgttttaaaacattcaactaaattgagtggatgaaaagagtacctagagggtactctttttttatgcttttaaaattagttagaaattaatgatcaataaaataggtgtttattagaattcaaaaaaatattttaaaagcttgagcggcggctttgtaaacaggaggttgtcataaaatcgtcataatcatattgcatattgctcatgtttttacaaactattaaatattacagagacgtgaacagatgactttaagattaagtgtcgctgcgatgggtttattactcagcggttcagtattttcagcagttacaattacagcgccagaggaaatcgtaatccttgcggtgaatggtcaggaagtcaactctggattattccgttcttctaaaaataattataaagtcgatgctggtgagacaagcctaagtgtacgttatcaagaatattttgagcatttaagtggcgaacacgatattgttaagtcaggagtggttaccattcaaactccagcgcttaaagatggtcaaacttataagcttgcaatggtagatgctccaaaacaatttgaacaagccaaaaaatatgctgagcaacctacagtggctttatataattcaaataatgagttaattgttcaacaaactggtgccaataatgaggcaaggccgtggtttgcatcgggattgctagggaaagttactgatttcacgactaaatcatctaaacaacaacctgacgctgtgtatgcagctgcaaaacctaccacgactcaagctaatgcacctgttgcaacaactatgcctcctactggtgtagcacaaactaatgatcagcgtttggcagaaatttggaaaaaatcttctaaagcagagcgtcaaaagtttatggcttggttggctgagcagtcgaattaattgctattcaaaataaagccgatttaatatcggctttatttttagaatattttaaatagcctaagtatatttatgatcaaattaaatttccgtttagcagaatttagtgacatcccaacactagtagagttgattaatcagtcatatagagaacaacaaggtagaagctggactactgaagttgaatatgtaaaagggcaacgtattaataaagagcaattgaaacaacaattagaattacctaattcagtattattaattggagaaatagattcttcaaaagttgttacatgtattggtcttacatttcaaagcaatacagttgagataggaacattttgtacagatccgcatgttcagaatatgaaaataggacgttctgttttggagtacgctgaacaatttgctttacacaaagtacctgaattggacagcgcaatcatgtatattttaaatgtgcgttcagagttaattgcttattatgaaagacgcggatatataaaaacaggtaatcatgaaccatatccgcttgacgcaaatgttggattaccacttataccaattaaactaatcgaaatgaaaaaggacctcaaatgaggtcctttttgtttaggttagaaaccagatgtaatagcctaaaagcatgagaggccaagctatccatggactaaacaaccatttccataaccagaagtgcggcacaaaacccactccataaatgaagcctccggaaatacccaccatcaccagcataagctggctatgattgtagtgtccgtttgcatctaacatgagggaaggatgcaccagtaaaattacagcaagcggcaatgccaacagaaatgaaatggccattgcgaatgcttgagcttttcgttgatttgatgctgtcattgcggttgccatgatttattcctcatctaaattttgatgatgttcgatataaagagcactcaatacacccgcgaaacatgccatcaaaattccaagaatccatgcgaaataccacatttgcttctccttattagtacaggctatgcgagtttgactcgatatgtttattagtaataacgccccacattttgtaatacgaccaactggtgtagatcaaaatgatcggaacgaatatgcatgcagcaacagtcataacccctaaagtacgatgacttgatacggcatcccacattgttaagctagagtttggattaacacttgatggcaataaaaatgggaagagtgcaaaaccggcagttaaaatcgcacctacaatcattaagcttgtgccagcaaaacttaaacccgctttggcttttgatgctgtaaagaaggcaataattgcccctaaaattgccagtacaggagctacttttgtaatcggatagctgctgtagttattcatccagcctgggttgttgtttgtgactacttctttggctaaagggttaagtgctgcgtttggatcaactgcagcagcatagctataacctgggacttgaccgaagtacaaccatgcaccaattacaaggaaacaaactaaaaatatggctgccataatttgagttgctttagcagagcgttgtttcaaggcaccgtctgtgcgtagcataagccaagcgccgccatgagcacacaacatagaaaggctgacaataccgcaaattaaagcaaatgggttaagaagagcaaagaagctacctgaatattccgagcgtaatgtactgtctaaactaaaaggaatacctaagaataaattaccgaaggcaacaccaaaaacaagtgctggtacggcaccaccaatacaaagtccccagtcccaagagttgcgccattgggtattttcaagtttagaacgataatcaaaacctacaggacgtaagaacagggcaaatagcacaagtaataaggcccaatacattccggaaaatgcgaccgagtataccattggccaagctgcaaatagtgcaccaccagcagtgataaaccagacctgattaccatcccagtgaggtgcgatcgtattaatagcagcacggcgttcgttatcagttttaccaacaaaaggcatgagtgccattgagcccatatcgaaaccatcggttagggcaaatccaatgagtaggactccaactaacacccaccatatgatttttaggagttcgtattcaatcatgataaagcctccccattaacagctgcttttggctcttgtttttcaaaatggtatttaccagtgtgaagtgagcttggacctaagcgagcaaacttaatcattaagtacatttcaataatcaaaagtatggtatagaacgctgccagagcgagaattgagccccacacatcgcccgtacttaaacttgaagctgataagtgcgtaggtaaaatttcaccaatagaccacggctgacggccgccctctgctacataccaaccagtttgtgcagcaatccacggaagtggtagggcaaataatgcatatttaagtagccaaggtttattctcagcatttcttttcgctactgcccaagttgctaaaatgaaaagaagcagcattaagaagccagaagcaaccattgcacggaaagagaaaaacagagctgtaacattcggaatagtatcttttaccgctgcttgaatgtgctgctcgcttgcatcgactacattcggagcatatttcttaagaagtagaccatagcctaagtctttttgatttttctcaaatgaagctaataactctggtgagcgatcaccagcacgtaatttttcaagctcagcataagcaagcataccgttacgaatacgaacttcgtgctgttgcattaagtctttcaaaccagtgacttctttcgtagttgaacgagtggcgatgaggcctaatgcgtatggaattttaactgcataatctgttcgcatttcttcatggtttggtacaccaaacaaagtaaacggagcaggagcagggtgagtatcccattcggcttcaattgcagcgagtttagttttttgaacatcacctagttcataacccgactcgtcaccgagtaaaattactgaaagtgtagaagcaagcccaaaaatggcagcaattgcaaatgaacgacgtgcgaagggaaggtcacgttttttaagtagatagtagcttgaaatggcgagtacgaaaatcgcacctgttacatatccggcagaaacagtatgtacaaatttaacctgtgcaaccgggttgaaaataagtgcgccgaaatcaacaagctccatacgcatagtttcgaagttaaatgctgcacctacagggttttgcatccagccattcgcaactaaaatccagagcgctgacatgttagaacctagggcaactaaccaagttactcctagatgttgaactttacttaagcggtcccatccaaaaaagaatagaccgataaatgtagactcaaggaagaatgccattaagccttcaattgctaatggtgcaccgaatatatcacctacataatgagagtaatatgcccagtttgttccgaactggaactccatggttaagcctgtagttacgcctaaggcaaagttaataccaaatagttttccccaaaacttagtcatatccttgtaaatctctttaccagatataacgtaagtggtttccataatagccagaataaatgcaaggcctagggtcaaaggtacgaaaagaaagtgatacattgcggtcatggcaaattggaaccgcgaaagatcaaccacgctttcagaaatcatcaacgtgtctccttaatgtgggaagagttatcgcctgcaatatgctcggcgacctgattgtcaaaatttttggggatagtaggagcgtcaaaccaaatatgtttgattgttaagagaagcgcgactttaattattagaataattgcgatttctctaattaatcgggagttaatatctagatttttaaggctcataaaataaacctcgatacatattaatttcattattaatcaaaatatattaaaaataaacaataaatatattttaaataaaaacttaattatttttttaataaaaatcatatgtttaataatttaaataattattaataaaatatctgactaaaatggtttgaattaattattaaatccaactaaaacacttgtatataaaaatattaagttgattaaaatagtttgatttatatttaattctgattaaaaaggttggatataataaagtattttttatttctaactaaaatggttggtttaatattcaattaaaataacagtaaaataaaggcaataattaaaccttttaaaaagcaattaaagacgagaagaattattaataattaatcaggcgcgaaaaggtcattcgaaacagaaattttcttggcaacataatggcttttatgcactttgataagaatgacttgtgaatatagttctaactcaccatactcaggttcaacctggacatagtgcagttgtccaaactcatcacgtacacgagcttgtgctgaaaaaccaggtcttgcactaccactggaaatagttgctagacgccctaaaaggttatagttggtatgtgtaagcttgggtttaatgacttgatcaaggcagtgaatcataaatacggtaaagaaaatcgcgatgaccagtgcagggatgattaagtaaaacggcgtgataaagtaatgctgtatagcaaagaaagaaagctgtaaaaaataaccggcaaaactgaaattgatgagtaaaaaaacaaaaattagagctttagaaaatttaacattgagcaaaggggaattggtaagccaaactggcgcaattttttttaatagctggcttggtcgtaaaccaacatacataccaatagtttctaccacgctgagcaatatcaaagccacaacacttaaatgaaatggcataagataataattaaaaaagaaatcagccatggtagaaactctaatgttgatgatctcagtctacgatataaataccgccatctgaatgcaccttaatctcaactttatttagaaactcacctaaacaaggacctgaaatacattcaccagtctccacgttaaataaagcaccgtgggttgagcattggatatattcttggtcttgatctagaaattggttttctagatattcaagttcggtttgcaaatgtgggcataaattctgataggcgtagaaagagccatcacgctgtgtaatgaaaatagtagttccttgtaaagtgtcaaaagctctagcttcacgctcaggaacttcttccgtcatacagatcctctccatttcaagcacattccttctgaaaattttcgagaagtttagcatagtcattaatggctaaacgaggaccaaattgagacacgacttcacttgaaattaagatggctaactgtgcagcagcagttaaatcttcatgatggtttaatgcgtagaggaaggcacctgcaaaagcatcacccgcaccatttgtatctacagcttcaacatgacggcctgcgacgtgaaaatggtgagttggatttgcaactaaagcaccttttgcactttgtgtaatcacaacggtatggtttttaaaacgtaattgagtaagtgcatcttcaacagtagtggtattggtatacattaaggcttcttgttcattacagaacaataaatccacaccatcatccataagctcttctaggccttcacgggcatattgaaccattgcaggatctgataaagatagggcaattttaacgccgtgagcttttgcaatttctctagcttgttttaccgctttacgtgctgtttcacttgtagaaagatagccttcaatataaagccattttgctgtttttaatggttcaaaatcgatttggtcttgagagagctcagcggtaatacctaaataggtatgcatagtacgctcagaatctgggctaatcaggaccatacaggtaccggtcaccccttcactgatggactttggtgtagtctggatgcctgcatcatttaacccttgcaggtaaattccacctaattcatcatgaccaacgcggcaaccataaaatgcgctaccacctaatgcactaaatgctacagttgtatttgcagcagagccgccacttgcttgacctttgtaatcttgagtttgttttaatttttcataaagggcagattgtgtttcaccatcagacaactgcatggtgcctttttgtaagccttgctgactaagaaaatcatcagaaactttaaattcttggtcgattaatgcattaccaattgcaaaaagatctacagttgccatatgtgttgtcacagaataaaaaatcagatcgataagtttacaccattgctcacatttgctgtagtttgttgaataaaattcaggttattcagcggctagcagagttttattgtttgcctaagcaattgaaataatctttttaataaatattatcaattaataatgattcttgctaatatttacaaatctatactgtttcattgaaacttcgcctgaaatttttcgtagcgaacttatatgaagcgttcagttttatttatttcatcagttggggttatgacaagccatgtatatgctctggaagcagatcaacaggcagtaaccaaccttccaacaatttcagttaaagctgataaggaaatcagtttaaaacaagaagtggggcaagcatcaagtgcaactaaaggacttatgcaattaaaagatgtccctcaaattgtaaacgttgtacctaaacaagttttaagagaacagacagtcacctctatgcaaggtgccttgcaaaacgttgcaggtttaagctttagtgtaggagatggacaacgtgatcaggtcatgattcgtggtttctctgcaatcactgataactatgtagatggtattcgcgatgacgcattgtattttcgcgatatgtcgaatgtagagcggatcgaagttttaaaagggcctgcttcggtattatatggacgtggttcagcaggtggtttagttaacaagattaataaaaaaccaatggatcaatctttgcgtgaagtgagcctgattggtagtacaacaggacaacgccgcgcagaagtcgatgtaaatgaaaaagtcgcagagaatgttaaggttcgcctaactggtgcagttgaagattcagatggttatcgtgatcaggcttttttaaaacgtcaagcggttgctccatctgtacagtgggatattactgataaaaccaaacttttacttcaggccgactatttgcatgataaccgtttggcagatcaaggtttcccaacagacccgattacaggtaaacctgttaaaacaaatcctaaaactttttatggcgctttaaatggtaaagaggttggggatgttgacactgaaatctcaagccaaactatcagcttagaccatgagtttaatgataattttaagtatcatggtgcagttcgccactataactactcacttgatcgtcaatatagtgtagattcacatccagctgctgataagtcaaaaattactttaacccagaataaacgcttgcgtaatgaagatggtgtgtatgttcaacaagagttgagcgctttatttaatacaggttttttaaagcacaataccttaattggtgctgaatatagcaagcagcataaagatgagatactttggcaaggtgctaaaacaaccactgatttatataatcctaaattagagtattgggcgcctattaatacaggaactacaactgcacgtaataacaatagcaatacttttgaaaactacggcgtgtatctgcaagacctaatgacagtgacagatcagcttaaagttttagtgggtttacgttatgacaatctatcgcaagatcgtgatgataaaacgagtacgaatttagatttaaaccgtactgacaatacttattctccacgaattggagtggtctaccagccagtaaataatatctcactttacacttcttataaccgctctttccaacctttggctgattcatttgttttttataaaaatagtgatgacttaaggcccacaaaaactgaaaactatgaaattggtgcaaagtgggatgtaaatgatcagttgaatgtaaccttggctttgtttgagatgagccaaactaatattcaaaaccaagatccagcaaacccaaatcaagcattgttggcaggtgagcaaaaaaccaaaggtgttgagctttcattaacaggtcaattgaccgatcaattgtcagtattggcaggttattcgtatatggatggtaagattgaaaaatcggctattggttttacaggcaatcattctgcgctcacgccaaacaatactgctaacttatggttaaaatatcaaattaatgatcattggtatgcagctgtgggtggtcgtggtgaatcatcacgttttagtgcgccagacaacaaaaacgttttaccgggatatgcagttgtaaatgcggcgttaggttatcaaagtgaacgttatgatgtgaacttaaacttaaataacttgtttgatcgcgattattttgtgtcaggtcatagtggagcaaatgattcgaacatgatgggcgatcctttaaatgctcaagttgcacttcgctatcgtttttaattaaaaaaactctaaaaagctcatcatttcgatgagcttttttatttgtcgtgtaggatatagatagtattaaaaggttttgttctgataggatacaacgacgcgggctatgtgcttgatattaaagctatggctatgaaaactaatacttaacaaaaacatagtgttttgcttggcttttattcgccattctcaagccgactcaggctataatgagacttattcacttatccgatatgttaggagatcacatgactgtagatgtcactgaaaccatttctcaaactgttcaccctgcgtttcagttgctacgtcagcaccatgttgaagcattagatattttagtgtctgaatataagcataaagtcacaggtgcggtgcattatcacttggcaactgattatgatgaaaatgtatttcttgttgcgttcagaacacaacctatggactctaaaggaactgcacatattttagagcatactgctttatgtggctctgaaaagtttcctgttcgtgatccattcttcttaatgatacgccgttcattaaatacttttatgaacgcgtttacagcagcagattggactgcatatccatttgcaactcaaaataagaaagatttccaaaacttattatctgtttatcttgatgctgctttctcggcaaatttgaatcctctggattttgctcaggaaggtatccgtattgaacttgaaaatggtcagcctgtatataaaggcgtagtcttcaatgaaatgaaaggtgcaatgagtgcgccttctgatcagctttatcaccagttggctcatcatctattccctgaaaccacttatcactacaactcaggcggcgatccaaaagacattcctgacttaacgtatgaacagttagttgaattttataaaacccattatcatccgagtaatgcggtatttatgacttttggtaaccaaaccgcctatgaattacaagagcaatttgaaaaactggctctacataagttcactgctggtacaactttatattcgaaaccagaaaaacgcttaacggcacctgttgaagttactgaaacttatgctgttgatggcgatgagttaaaagacaaaacttaccatgtattgtcgtggttattacctcaggcgagtgacattaaacttcgtctgggtatgcgattagtagaaggcgttttactcgaaaactcagcttcaccacttcgtcattatttagaaacttgtggctatgctcagtcgactggtcctttaatgggggtagacgatagtaactttgaaatgacgttctattgtggtgttcaaggttcaaatccagagcatgcagagagctttagagagggcgttttaaacgttttacgtgaagtagctgcaaaaccaattgactcatcgttagttgatgcaattttgcatcaaatcgagttacaccaacgtgaaattaatggtgatggtacaccatatggcttaagcctaattttaaatgggttaagtggtgcgattcaccataacgatccgattcaaatttgggatgttgatagtgccattgctcaggtcaaagaagaactccaagacccaatgtggttatctaacctgattcaaacccatttattggataatccgcaccgcgtgcaaatgactttagtaccggatgcaaccaagtcagcgaaagagcaagaagctgaaaaagcacgtttagctgcaattggtgaaaagctaactgaagaagataaagcagagatcatcgctaaaaccaaggcattgcaagaacgtcaagatacaccagataatcttgaactgttgccaaaagtaggtctagaagacgtaccagctgacttgcatattgtacaaggtcaattgcgtgaaattatttgtaatcgaatggatacgccgttgaatttgtatcatgcaggaaccaatggtatttactatcaacaagtcctcattcagattcctgatgatgtggttaaatcaccatacttcaatttgctctctattttaatgggtgaagttggtgcaggtgagtatgactaccttgaactccagaacttacaaacagctgtaagtggtggtttgggaatgggtgcttcgttacgcagtaaggttgatgataaagacaaaattagtgcttggttaactttaacaactaaatctttaactcagaagttcgatgcgattcatttattaaaattagcatttgaacaacttcgttttgatgaaaaagagcgaatcattgagttattgcagcaacgtaagacacgctggcagtctcgtttatctggtgctggtcatagttatgcaatgcagattgcttctcgtaatatgagtgcgttagctcaacgcgactatcaaaacactggcttaggtgcgttgaactggttaggcgagcttgttactaaaattacccaagatgatgctgcttatgatgcgcttattgctgaattgaagcatattcatacaaaattattgcaagcacctaaacagttcctgctcgtatgtgaagagcatcagtcagagcgtttagttgaagaaattcaaaatgtttgggataaattaaacgttgatacagcagcaactgagttaacccaagttgagcaagaaaatgataatgaacatgaagcttggttaattcaaaccaatgttcagttctgtgcctctgcatatcaagctgtggaagtatctcatccagatgcggcacctctaatggtattggcagcttacttgcgtaatggtttcttgcacagtgctatccgtgaaaaaggtggtgcttatggtgggggggctagttatgacggaaatgcatgttcattccgtttctttagttaccgtgacccacgcttagctgagacttttaaagattttgaagcgagcgtgcaatggttgttaaacacagagcaacaacctcatcagcttgaagaagcaattcttggtctggtggcaagtatggacaaacctggttcaccagcaggtgaagcaataacagcgtgttatgcattgttgcatgcaagaactccgactttccgtcgtacattacgtgaaagattattgcatgtaactttagaagatttacaacgtgttgcgcgtcaatatttaattgaacaaacacctgtaaaagctgtcgttgcaccttttgcaaaacgtgatgaattgcaacaactgggctttacgatcaaacaagttaattaaaataaaaattggagatgaacatggcgttcagacaatttgaacgcacatctttacagctaagtatgggaaccctgcttagctgtttatgtgcgtcggtggcatatgccgacaccttagcccctgtaaaacctgcgagtgtagatgcatgtgttgcccttgcttcgaatgctgatcgcctagcttgttatgatgctgtgtttaaaccatcggccttaccagtagttcaagccgcagtagtaccagagcctgttaaaaaaattgataaacctgttgttcaacctgaaacatttaaagaaaaggttgtagataaggtaagtaatatcaaagtaattggtaaggcacctacacttgaacctactacgtctttactagatcaacgttgggagttgtctgaaaaaagtaaactgggtgtttggaatattcgtgcttatcaacctgtttacttgctaccagttttctggacgagcgataaaaatgagtttccaagcagtccaaacccaaataatacggtgacagaggcccaaaaccttaaatcaactgaaagtaaatttcagatttctttgaaaacgaaagcttgggaaaatatttttggtaacaatggtgacttgtgggtaggttatacccaatcttcacgttggcagacctttaatgctgaagagtctcgtccattccgtgaaacgaactatgagccagaagcaagtttaatgtttagaacaaactatgagttgcttggcttagatggtcgtttgcttggggtaactttaaatcaccagtcaaatggacgttcagatcctttatctcgtagttggaaccgtgtcatctttaatgtgggtttagaacgcggtaactttgctttaatgcttcgtccatggatacgccttgaagaagacagcaaagatgataacaatccagatatggaagattacatcggtcgtggtgatttaactgctttttataagtggaagcaaaatgacttctcattaatgctacgtcactctttaaaaggtggtgatgattctcatggtgctgttcagtttgactgggctttcccgattagtggcaagctgcgcggacacttccaattatttaatggttatggtgaaagcttaattgactataaccatcgtgcaacttatgccggcttgggtgtttcactcatgaactggtactaagtttgacctataaaatgccgcttttacagcggcttttttattaaccaatttgaatgttggcttgaggatgtttgagacggctttttttaggagtagcaattaaataggcgagtgttaaggggcctaaacggcctgcaaacataagtaggcttaaaataaataaactaccattgtgtaaatctggcgtgataccgcgagaaaggcctaccgtacaggctgctgaaacgacttcaaataataagttcataaagtctgctttaggttctaaaagtaaaagaataaagaacccgataaatatgagaatactggtaattgcggtgacagctaaggctttataagtagtttcgtgagaaacggagtgattgaaaaccctgatttcatcggtacgtcttaaaaaggaaagtacacttaaaactaatatgataaaggtgccgacttttatacctccagcagtactgagtgaacctccaccgatgaacatgagtagcatcataagtaaagaactactgttggtcattgctccagtatcaatagtattgaaccctgaagaacgtggaacagtcgcttgaaaccatgcatttaaagcttgatcacctacattgagcagacctaaggtatgaggattttgtgcttccaaaacccaaattaatacaaacgcaaccaaattaataatcgcaatagttgttaggatgagtttgctatttgggctgagttttttccattttttattttgtttgatatccatgaggactaaaaaacccagtccacctaatgtatagagcaaactaatcgtaatacatataaggtagttgctttggaagttaactaaactgttgctaaatagtgaaaaacccgcattgttaaatgatgagatactatagaaaactgcataatatagtcctcgagcaaagccataaatcggtgtaaatgcggtagttaagatcactgttccaatcagttcaaaaagaagtgtgtaagtaacaacaccttttgctacaaaagtaacctttgaaagactagtctgcccaaggctatcttgagccatcatttgctgtttaaggccaactttaggagataaacttaatgctgccaaaatggcaaaagtcataaagcctaaaccacctgactgaatcaataataaaataatgacctgtccgaaaagtgtaaaagattcatgaatatttaaaacggatagacctgtaatagtgactgccgaggtcgccgtaaatagagcatccatccaactaacatgtccgttattggcaataggaagtttaagcaataatgtgccaaagacaataaagcccagaaagcccagtgctaacagagaaggtgggcttaaatttagtgttttatgcggtttaggcttaagagacatattttctggttcgttttcttatatgaaacaatttgagagtttttttagctgctgtaaatgaccttctaaaataagaatatcatgcgtttgtaaagtaaaagtctcttcggtttcaaataaaatctgctgttgtctttttacaagaagcgtttttacttgaggggcttgctgcataattccgtacaaattaatgccgtttaacttctctggaatatcaatttttacaatatagtgctcatcatctaaagacatataacggctcaccattgggtagtttagtgcttgagcaacacgtacccccatgtcttcttcaggatgaatgattttattgatatttagatgagataagattgtatgatgtgctttggtttttgcttttacccaaattttatcaatgcccagattttttaaattcaacacacataaaatactggcttcaatatcttcaccaattgctacaaccactgcatcacaattttgaatgtttaattcatccaatacatgttcatctgtagcatcagcaatgacagcatgagttaaaacatcggcaaggttctcaacattctttttgactgtatcaataccaataacatcatggtttaatctcgtaagttcctgagcaacagttgccccaaaacttcccaagccgatgaccgcgaactgtgccatagttgtccttttatacttagttagggctttatttttaatgatattttctttgagataaagagaagcaatgtaaatataaaaaataataagcttaaatgataaaaaagccgacatatttgccggcttttttatcaaaatgaaaggttacttcaagaaacgtttatagcccacattgtcagtaatttctgcatatggatagctaatttgctccagagtttcaattaaaccatctgggttttgtttagcatctgttgcttgtaagccaactagtacacgaccttcagcagcgccgtggttacgataatggaacagcgtaatattgtgggttggacctaaacgagttaagaaggtgagtaaggcacctggacgttccggaaactcaacacggaacaatctttcgtcatccagattggcatgaccaccaatcaagtaacgaatatgcaatttggcaacttcatcatcagataaatcatctacaacataattttgctgtttaagttgttctaaaatttcatgacgttcagtgtcaccaccttttaagctaatacccacaaaaacttgtgcttcttctgtgttatttgcacggtagttaaactcggtaatgttacggccctgtagagcacggcagaagcctaagaatgcgcctttttcttcagaaagagtaactgcataaatggcttcacgttgttcacccaattcggtgcgctctgcaatgtaacgtaagcggtcaaagttcatgttggcgccgcaaacaatcgataccatgtttttgccgctaattttatgctcggcaacatattttttgataccagctagggccatcgcacctgacggttcaacgatgctgcggttttcatcaaaagtatctttaattgcagcacagatctcatctgtatttacagtaacaatatctggttcaacaattggtccagaattatctgatttgcgtagacgaacgatatcaaaaggtaaggcaccaatttgagcaactgctgtaccatcagcaaataagcctacgtggggtaggactacacgttcattggcttctagcgctgcttttaaacaagctgactcttcatattcaacaccgatgactttgacatgcggtgcaacatcacctaagtaagctgctacaccagcaattaagccaccaccaccaacagcaacaaaaacatattctacatcacgccattggcgtaaaatttcattcgcaattgtgccttggcccgcaataaccaactcgtcgtcataaggtggaataaaaactaatccttcagcttcggcacgttgctgagcgtatttgtttgcaatatcaaaactatcgccatgtaatacaacttggccacccaaacgcttcactgcctgaactttaatgtcaggggtagtacttggcataacaataattgcaggaatacctaaacgttgaccagacaacgctacaccttgcgcatggttgccggcagatgcgcaaatcacgccacgttcaagttgttctttcggtaattggctaatacggttataggcaccgcgtaatttaaaagaaaaaactggttgtaaatcttcacgcttaaaacgaattgtgttgtttaatttttgactaattcgtggagctgcttcgagaggtgtttcaattgcaacatcataaaccgttgcttgtaaaatttgtcgtaccacacgagacagcatgttcatcttccctataacagtttaaaataggaaattattgtagcaaacccttgtccatttgcgccgtttattggcgcataaatgtcaaaaaatagttgagtgatgtaatgagcctatatgcaacccaagatgaaaagaaacaagctgctgcgaaagctgctttaaaacacttacccaaaggtggcattttgggggtaggaactggaagtactgtaaatttcctgattgatttattgcctgaactacaattagaagcagcagtagcaagttctcaagcaacagcagatcgtcttaaaaaattaggcatagaagtggttgatatgaaccatgtgggtagccttgatgcttatgttgatggtgcagatgagattgatcgtcacatgcatatgattaaaggcggcggcgcagcattaactcgtgaaaaaattgtagcctcaattgctaaaaagtttgtatgtatcgttgatgattcaaaatgggttgatcaacttggtcgtgatttcccattacctgtagaagtgattccaatggcgcgttctgctgtagctcgtaaattggtaagcttagggggtgatccggtttatcgtgaaggtgtggtaacagataacggaaacgttattttagatgtatttaatttgaacatcttaaatgcaattgatttggaaaagacaattaataatattccgggcgttgtgactaacggtatttttgcgttaaatccagcaacgattgcaattgttgcaacaaatgatggtattgaagagcgtactgcacagtaatgtctgtggaaatgccagaaattaaaattgttcgtcacgtaagggcaagaaaattgcgcttacgtgttgagcctgcgtctatacgacttactgtgccgttattttgtagtaagaaacaaattcagcagtttttagctcagtctgaacaatggttaatcgagacgtggaataaacagcaccacgttcaatctacctcatttgaaattccttcagaaatttctttttttaatagagaacagccttttcaaattgttgtgcagaagcaacatcgcatttttcaatttgattgggaagatagttatttatttattaaagatcaacaaccctatcaagctttacaaaacgctgttattgcttatgcaaaacaagagttgccagcacttttgtcagaacttagccaaaaaactcgactgagttatgcagagtgtacaattcggcgtcctaaaactcgttggggaagttgcagtagtcaacataatattatgctgcatgcaggtctggttcttatgcctgctcaaattacccgttatgtttgcattcatgaactagcacacaccaaacacttcgaccatagtcctgcattttgggccgaagttgcaaagttcgaccctaactatatgcagcatcgcagacaattaaaaggtaatccattgcctgcatggtggtatgttacaacttagctaaagctacactctaattgtgttgtttgtaagacatctggtgctttgcggctatcaaggcctgcttgagcactaacaatcttgttcgctttaatatgtagctgtataaaattatattgctgtgttgaattgttaggttcggatgaacttgagttaagtaaataactataacttgcagcgtcggtttgcagtaagttatctgtactatctgcgcttaaggcagagcgatagctttgagagcctttaattaattcaatttgaccattagcacggaagttaagttggcagcctgttgtactgtcttcatagtgaccaactaaatagtctgtagctggtagttttgggtcagaaatattgatactagttaaaccttgtttacacggataagccgaaccattgcaggtcgttgtaataccactaaagccaacagcacgtcggtaatctcccgcaccatctatacggaaaaattcagatgtattaccagcaggtataatccccgaatattgtttcttgtccagtagatcataacctattgggtctaaatgggattgatcttgcaaatctgctagtttaaaggtggctgctcttagattagtggcaaaataatcacgtgttaccttttgattagctgcgatatctaaaagtgtgttttttgctggatcaatattatcaggggctgaggtgaagataggggtaaaagatgatttgtccccaataagttttttgccgtctaaatatccatcttttaaatctgtagcgagactttgggtgagatcttgataaggtgaattcgtattatggatgcttgaccaatattgaagataaccaaagcttagataactatccacataagtacttggctttgtggttgagtatttcaataaatttaaaattgtaagcgtacttgccggacttaaacttggaatattggtatctttaaacgcattaagaagagatctgtagacatcttgagaggctaagtcaacatgtaattgttcaatacgggttgggataattgtctcattaggcaactgacctgaacgaatcacagcacgttgataaattgcttctgaacttgggctgatcaattgtgttttattgcttatcgagcttggggtaataaaagcgtgataaacaccagaaatattttgatattcagatttggttggatcaaatacttgagatgagccttgggtcgtgacttcaacacgataaagacgatttagttttgtgcttggaagtttaatatcgtaactcgttaaactggcaacttgggtatcaatcaaaatactattgtcggtattatcatataccttgagttgaacattgcgcatttcgacaggggttttaagcgtaatatccgtcatgacttcaggagtgggttcagacggtttaggcgtgttagatgaacctccgctactgctaccaccaccacacccaacaagggctacacttaaaattaaagtggtgaggccgagataagtgcacacttttatttcttttgattgatcaagcatcctagctctccaaaaataaatttggtatttatttactgatatttgtttggtactgacaggccggcaagtgctatgtaattatcgtttaaaataaaaaattaaaattaccaagcatgaaatggttttgtaagcctagacatcctgtcatactaccgcaagtatagattcaaaatttgaggtaatgcacgtgatttctgtcggaattgttggtggaactggttatacaggcgttgaactattacgtattttattacgacatccaaaagcgcaggttcgagttctgacttcacgtacagaagcgggcaaaccagttgctgatatgttcccaaacttacgtgggcatacagatcttcaattttcagatttaaacattgatgcattaaaagaatgtgatgttgtattttttgcaactcctcatggtgttgcgatgcaacatgcgaaagatttgattgcggcaggcaccaaagttattgatttagctgctgactttcgtttacagaatcttgagcaatttgaaaagtggtatggtatggagcatgcttgcccagatgtactaaaagattctgtttatggtttaaccgagttaaatcgtgaaaaaattaagcaagctcaagtcattggtaatccgggttgttacccaacgactgttcaactgggcttggctccacttttaaaatcagcacaagcattgattgaaacaaagaatattattattgatgcaaaatctggtgtttctggtgctggtcgtaaagcaagtttgggcatgatttacagtgaaaatgcggataactttaaagcttatggtgttgcaggccatcgccaccatccagagattgtagaggctttggaaaatattgcaggtaagaaagatgtttttgagggtcttttatttgttccgcacctagtaccgatgattcgcggtatgttaagtacaatttatgtagacttaacagaagcgggtaaacaaacagacttacaagctttgtatgaaaacttctatgcaaatgaaaaatttgtagatgtcatgcctgctaatagctcacctgaaactcgcagcgtgcgcggagcaaatgaattacgtattgctttgtataaaccacaaccaaataaactcattattttggcggctcaagataaccttgtaaaaggtgcatctggccaagctgtacaaaatatgaaccttatgtttggctttaatgaagatgaaggcttacaagggattggtttattaccataaaaaactcttttttgcttcacacacatttaaatttcgatttaaatgtgtgtcttgactctgatcttaaacactgagatgacgatgcaaaactcggaacagacgacttctgtagaaagttcgttgcaaaagaaaaaatttttaaacaccaataaaccattatttattggtgccgctattttaatgagtggttgttttgcgctcggctatacaattgggcaccgtcaaggtttaactgttgttggttacgatgcagatgcagagcaattggttgaggtagtgcaaaagcaaaaaacagcattagatgcagttaacaaaagtttgaatgctgctgtacaagagcgtgatgttgctgttacaaatgccaatgatttgtttgaagcacttaatcaagccaatgctgataaaacgcagcaagaaggtatgagtaacatctatcgtgaaattttaagacaacgtggtggtttaagcttaacaattcagaatttggcgataaaaccgttaccggaaaatgcttatgaatatcagcttgatctggtacaagttagcccgagtaaacgccgtgcttcaggtttagttgaaataagactgattaaagatacagaagttttagtggtaccacttgaagataagaactttaacttcactgattttgagcgtttgactggccgatggacgatgcctaaggggttcacacctcaatttattgaagtgcgtctaacaggcggttctgatacaccggttattaagcgttttagttggcagcgtggtaaacctgtcgaaacaccttctgcttttgttgcagaaattcctcaagctgaagcaaattcacaatagtaacatcatatgcgaacaaataagcgtcaaacaaatttaaaagatattaaggcttcttttcagcagtctggctatgtcgattggcacttcaatccacgcttaagtgattcgcaaaacgaagatcatgacggagaggttgttgtgcaaacagcacctcccgaactcaagcgtcctcccttatatgcagtagtattattgaatgacgattacacgccaatggattttgtaattgaaattttacaacaatactttgcaatgaatcttgaccaagcaactcaagtaatgctaacagtacactatgaaggtaaaggtactgccggggtatatccaagagacatcgcggaaaccaaggcaaaccttgttaataattacgctcgatcgcaaggtcatccattactttgccagattgagcctaaagcataagggggtcacatgctcagtcgtcaattagaagtatcattacgtttggctgttagcatggctcgtcaaaagagacatgagtttcttacagttgaacatttactattagccttactcgataacgattcggctgtgaatgcattaaaagcatgcggagctgatattgtttctttacgtaaagaattagaagaatatgtagaacaacatactcctaagcttggcgaaaatagcgagcaagctccacatccaacagaaagtttcgaccgcattttacaacgtgcaattttccacgttcaatcaagtggtggtgaccgtactgttgaaggtgcggatgttttagtcgcaatgtattcagagcgtgattcttttgctgtttatctgcttaaacgtcatcaaattaatcgattgactttaactcaatacttgtctcatgggacacgtaaagacgaagttcaggttgaagaagaagttgaagacattgagggtgaaagcaattcaggcaatgctggaccattagaactttatacgctcaatttaaatgttgaagcgcaaaaaggtaaaactgatccactcattggtcgtgagaaagaaattgagcgtacagcacaaattctttgccgtcgtcgtaaaaacaatccattgttagtaggcgacccgggtgtaggtaaaacttcaattgcagaaggccttgcttggctcattgtaaatggtaaagcaccaaaaccgctaagccatgcagaaatttacagccttgatattggtgcattagttgcgggtacaaaatatcgtggtgactttgaaaaacgtttaaaacaattgttaaatgctttgaagaaaaatccgaatgcgattttattcattgatgaaattcatatgatcattggtgcaggctcaagtatgggcagtacgatggatgcttcgaatctcatcaaaccagctttagcaaatggtactttacgctgcattgggtcaaccacgttccaagaatatcgtcaggtatttgaaaaggatcatgcgttatctcgtcgtttccaaaaaattgacgtaaatgaaccgagcatttctgaaactattgatattttacgtggcttgaaaacgaagtttgaagatttccaccatgtacagtatgacgacaaagctttagtttctgcggttgagctttctgcgaaatttattaatgatcgtttcttgccggataaagcaattgatgtcattgatgaagcaggtgcacagcgccgtctaaaagcagaaagtgaagacagtttaattactgtagagaacatcgaagatatcgtttctaagattgcgcgtattccgcctaaaactgtatctaaagatgataaatctgtacttgaaaatcttgagcgtgacctaaaacgtgttgtatttggtcaagatgaggcaattactgcattagcttctgcaatcaagttgtcacgtgctggtttgaaatcaccagacaagcctgttggtagctttgtgtttgctggtcctaccggtgtaggtaaaactgaggttacgaagcaattagcaaaacttttaggtgtagagcttgttcgtttcgatatgtctgagtatatggagcgtcatgctgtttctcgcttaattggtgctcctccaggctatgtaggttatgaccaaggtggcttactcacagatgcgattcataaaaatccacactgtgtgttattactggatgaaattgagaaagcacatcctgatgtgtttaacctgttattacaaatcatggatcatggtgcattaacagacaataatggtcgtaagtcagactttagaaatgtcattattgtgttgacgacgaacattggtgcagaaagtatttctcgtgcaagcattggatttacagagcaagaccatagttcggacaaccaagaagccatgaaacgtgcattctcacctgaattccgtaaccgtctagatggtgttattcaattcaaagctttaccaaccacagtgattgaatctgtagttgataagttcttgacagaattgcaagcgcagctagatgaaaaacgcgtagttttagatgtcgatcaaagtgcacgcgactggttggcgacaaatggttatgatcgcttaatgggcgctcgaccaatgcaacgactcattcaagaacacttgaagaaaccattagctgaaatgatactgtttggtgaacttgcagatcatggcggtaatgtggcggtatcagtgaagaaagaagatggtaaagcagtgggtctaaaacttgaagtgtttgaagatcaccatacggcagaaccagcttaatttatgttaattgatagtctttctataacccgaatatttagtgtgttcgggttatttattattactgcaatcgctgagattttgggttgttactttccttatcttattttaaaagaagggaagtctgcgtggctatggttacctacagcactgagtttggcagtgtttgtctggttgctgacattacatccggcagcgtctggacggatttatgcagcctatggcggtatttatatttttactgcgcttatgtggcttcgttttgtagatcaggtcgctttaaccagatgggatatcttgggtggcgtaatcgtgctttgcggagcaggtttaattattttacagccccaaggattaatccgttaattctgagagtgattatttaaattttaagtgaaaaaaataagcaattttttcgcaaaaaatacttgtcaaagtcatcaacaatgcgtattttagatttaaggaacattttttaatatttgagataaagatgttaaatcaatctgtgaattctaacgcttacttttatttctggcaatttagatagttgcctgagcgtattcgggcacgagagttgcccatcacagttaatacctgatcggcaaccccgatcaggtttttttatgctttatctttttcaaatcgaggactttaaaatgaacaacatgacttattcatactttagcaacttttattggttttacttttgcctacctttgccaacgaatagatccaaaacgctcaaataaatgatcggactgattaggtttcagtccaaaggaaaagaccaatgaatgccttaaatactttactaactcaaagcaatacaaaagaaacaccagttagtttacctgttcagttaaaagctaaatacccgcttgtgcagaccttcgcacgacaaattgcagaacatcgtcaaattattcaaaatattcttgctggcaaagatcagcgcttaatggttattacaggaccatgttcaattcatgacccagttgctgtacttgaatacgcagatagattgcaaaaattacaagaaaaagtaaaagatcaaatcttcattgtgatgcgtgcttatattgaaaagccgcgtacaacagtaggttggaaagggtttatgtatgacccaaatcttgatggttcatctaatctacaattaggtttagaaaaatcgcgtgagctatatttacaaattattgaaaaaggcttaccgattgcgagcgaaattttaagcccaatggcaacaggctattttgatgatttattggcttggggtgcaattggagctcgtactagtgagtcccagattcaccgtgaaatctcaagtcatatgccatacagtattggcttcaagaatggtacggatggctcaattcaaattgctttagatgctattcagtctgcacaaaatgagcatcaatttttaggtatgaatcagcaaggtttgccttcagtgattcagagtgctggaaatccattgccacacttgattttacgtggagccaatcatggtcctaattatgatttggcttcaattcaggcaattagagaaaagcacaaacaaaacctacctgccttagttattgactgtagtcatggcaacagtggtaaagatcctttacgtcagccagaagttttacagcaaatcgttgctgaacgtctaaaaactcaggtaaagggtgtcatgattgaaagccatttagttgatggtaaccagaagatttcatgtgaaatgacttatggtcagtcggtaacggatggttgtttagggtggaataaaactgaacagcttttgttaaatgttgctaaacaattaaaagcaagtgaattagctcattcggcttaatgatgtaaacatttaaaaagggatctgttttagcagatcctttttttttaagaagcatgtttaagttcggataaaaaagtagtgatttcatgcccgaatttttttggttcggttaataatggcgtgtggcctgaacgttcaaaataaattgtttttgcatgttcgacactatgtgcaatcagggtttgccccgtttctggatagagtgtcgaattgcgtccaataaagaaagttgttgggcactgtaattgctgaagtgcttcacgataatcttcattgtggaaaagataattttcaacataccaaaataagtagtctaaacgttgaatcggaagaagatatttttgtaaaaatggttgttttaacgcagttttaaaaacaaaagggctaaatggattgctactttgcaattcaataaaatctacccacaaacgcaccaacttttgacggtccggaagtgataattcataaagatatttagcatttttatggattgataataactgataaatatcattgagtaattgtttaaattgggcatgtaatggcccaaataacccatattgccatgtagcatctactgaaattttaggcgtttgatcgatatgtaaataggcctttaactgctgagcgagatgagcatgtttcatgccatgcattgcagtggtggctcccattgagtagcccattaaaataaatttatctaattttaattgctcaattaagtgagcaacatcttgccagtggcttgatatggcatcttgctcgggaattgcacaattttttgaaccgccaaagccccgccagtcgggaataataaactcgtattctttacgatttgcatagataaaaggtagccattgccaactttgcatacctaaaccggataaaactaataccggttcaccacgaccaacacggcgtacaaataaactttcctgatcgggcatggtgtaataaggcatgattattctccagatacattatcttgagcaaagagttttaattgcgggatgacttgttccaaccatttgatccactcagtttccatagtaatgccgagttctaagatcattttatgaatatataacactcgattattcaaatcatcgctatctttaaaatctttatcgtaaatagtttggtaaagcttaagcttttcttgatgtagaccaagatgtcgtaacagttcgggtaatatttgattattgcccaattgcgcctcagcgcgcaatcttaccattaggtcatctctaagctgtgccggttcgctttgctgcgtcatccatgaagcgagttcaatacggccaagctgttcgacttgataagttttttttcggccactatccatctcattttctaaagtggaaacccagccttttttaagcatgttattgagttcacgataaatttgctgatgtgtggcattccagaaaaagcccatagatcggtcaaaacggcgggcgagttcaaagcccgtgcttggccgttctagtaaactggtcaataaaacatgaggaagtgacatggcaatccgtttgtaagcaaaagtaaagtgtgactcattagattatgcaacatgttgcataaaagtcaaaatttgattataaatttgtgcaacaagttgcattaagcaagcagattagcaagccaaggagttgttatgtcgttatatccacatttattaaaaccattagatttaggttttacgacattaaaaaatcgcgtattgatggggtctatgcatgttggtctagaagaagcgcctggtggttatgagcgtatggcagctttttatgcagaacgtgctaaaggtgatgtgggtcttattgttactggcggtattgcacccaatcaggcaggtttaacctttgctcatgcttctaagttagatagcacagaagaagccgaaaaacataaagtcattaccgaagctgtacatgctgctggcgggaagattgcattacaaatattacatacgggccgatattcttatcagccagagattgttgcgccttcggcaattcaggcacctattaatcctattaagcctaaagcaatgacttctgctgaggttcaacaaacgattgatgattttgcaaactgtgcgaagcttgctcaatacgctggatatgacggcgttgagattatgggttcagaaggttatttaattaacgagtttattgcagccagaacaaaccatcgtgatgatgaatggggtggtagctatgaaaaccgtattcgttttcctgttgagatcgtaaaacgcacacgtgaaatagtgggtgaaaactttattattatttaccgtttatcaatgcttgatttagttgaaggtggttctactttagaagaagtgattcaacttgctaaagcgattgaaaaagctggggctacgatcattaatacgggtattggctggcatgaagctcgtattccaacaattgccaccaaagttccaagagctgcatttacttgggtcactgaaaaattaaaaggtgaagtttcagttccattaattacatcgaaccgtattaatacaccagaaatggctgaacatgtattagcgtcgggtcatgcggatatggtttcaatggcacgtccaatgcttgcagatcctgattttgttttaaaagcaagtgaaggccgtagcgatgaaattaatacgtgtattggctgtaaccaagcttgtctcgaccacattttctctatgaaaattgcaacatgtttggttaatcctcgagcatgttatgaaacagaactaatctttaaagaagcacaaaatcagaaaaatattgctgtcataggtgcaggaccagcaggtttaagttttgctgtatatgcggcagatcgtggacaccaagttaaaatctttgaagcaagtcatcaaattggtggtcagtttaatatcgctaaaactgtgccaggtaaagaagagttctacgaaacattgcgctatttcaatcgtcaaattgaattacgcccgaacattgaacttgtattaaaccatccagccacttatgaagagctaagccaatcagactttgatgaaatagtagttgcaactggtgtaacacctcgtcaattacaatttgaaggtattgatcatccaaaagtgttgagctacttacaggtgcttaaagagcgtgcaccagtaggtcagcgtgttgccattattggtgcgggtggtattggttttgatacggctgagtacctaacccatgaaggtgaaagtggcagtttaaatccagaaaaattttatgaagagtggggtattgatactcactatgaacatgtcggaggtttaaagcagccaaaagttgaagcttctgaacgagaaatctatttgttgcagcgtaaagtttcctcagtaggtgcgggattgggtaaaacgactggttggattcaccgtaccgggcttaagaacagaaacgtgaaaatgttagcaggtgtgcaatacgacaaagtagatgatcaagggcttcatattactgttgatggcaaaccaacagtgcttgaggttgataatgttgtgatttgcgcgggtcaagaatcatttactgcgatgtatgaccaattaaaagcagatggtaagaatgttcatttgattggtggtgctaaagaagcaggtgagttggatgctaaacgtgctattcgacaaggtgctgaactagcagcggttctttaatggcttaaatgagcattgtcttgggtaagagaatgctcatcactaaaacctatttgaaggaaaaataaaaatgacactcgaaataactaaacagtcattagaaaaatggcatcacatgattcaatcaaatgacttatcgaacttaaatgatttgctggcagatgaagtcgttttccgttcaccggttgcttataaaccttatgagggaagacaagttgttttctttattctcaccaatgtaattcaggtatttcagaattttacctatcatcgagagttttacacggaaaatggtgaaaatgtagtgctggagtttagtgcgaatgtaggagataaatcattaaaaggtatcgatatgattcgttttaatgagcagggtaaaattattgattttgaagtaatgattcgtccattgagcggtttagctgcattagctgagcaaatgggcatacgaatagctcaatttaaacctcaataattttgttaaatagcctaagaaagaatattgaggtatataaaaatgtggttaaaactttcaacattttttttattacccgtattgttcatacaaggtcataaagttcgaaagaacacaccacgtttagcagaagccaaaggtgaacgagaaggtagagctggtcaaggtaaatctttatctctgcttattttgggggattctgccgcagcaggtgttggtgtagaaaatcagaaagatgctttgtctggtgctattattcaagaactgcaaaatgaattttccctacagtggaaacttcatgctaaaactggcgatacaactcgacaagtttttaatgctttgcagcatttagaagagcagaagtatgatgtgattgtgacatctattggtgtaaatgatgtcacaaagttgatctctgctaaatcatggattaaacaacagaagcaattatttgagcatatacagaaacgttttcagccaaagttgattatcgtttccggtgtgcctccaatgcaacatttcccggctttaccgaatccactagcttggttgtttgggcaatatgcagtgcaaatgaatcaaaaattacaacaatggttagcaccacaaagccattttaagtttcttgaatatgatattgaaacttttcaagccatgaacttgcctatggcaagtgacggttttcatccaagtaaagaagtttacgcagtttggggacggcaggttgcagccatagtgcggcaatcatttaactcatagtcataggtagttattggatatgggcatatctgtttttaataaaattaaagatttcggttcggagctgttcgatttagtgttgggcgctgagcatccaaaagtctattatcatcctcaaggaaaaataaaagatattttggataagttgccacaacttaaacagaaatatcgtcctacgccttggctcacaaatagtcatgttcacttactttattttgatcttattagaaaacaaacaataaagttggcatatgatcgaattgatcaactcactatgagtgatggtggtattaccgcaattgcttggtatggctataacttaccgccagatacaccaacagttgtaattatgcataccattacaggtacacctgagagtatgcgtgaattggtacgcgatttaaatcaatacacaggctggcgaattgcattatgcctgcgccgtggtcacgcaggtttgccaatgcctgtgccgcaaatttctctatttggttctacgagtgatttaaaagaacaacttaaccatattcaaagtttatttccggcatcggatttatatgcggtaggttcttcggcgggtacagggttgctagttcgttatttgggtgaacaaggcgaagacacaccttttaaagctgcgtttgcgatgtgtccgggctataacacggaaattggttttaaaaatgtccaccctttttacagcaaaatgatgactaaaaagctcttcaagtattttatttatccgtaccaaaatacatggagccagattgcatctttagagaaagttttatcagcaaccaatttggaagaatttgaaaaagaatacttcgagatggcgggttttgaagattatgagacttactgtaaatctattaacccgatttatgtgttcgaaaatattaaaattcctttaatgattttgaatgctgaagatgaccctgtgtgttctattaaaaatttagagccatataaagagccgattcagcagatgagcaatgttgctgtggtgacaacgaaaaaaggaagtcattgtgcattttatgaaggatggcgcagtacatcgtgggcagcacgtctcatggctgattattttttaattgaacataataaatagataatctttgaatataaataaagcccagatctcgggctttattttttatactttaagataagagggatgatctatcacttattccaagttttacttttgtagcggcaactaaagctttttcatctgtctggttggggtgaaaatcaaaacggtagtattcaagaaatttaggaatcaacactttatattgtttgctcgcaaagttaaaaaagttgcgccaagttttgaaattggtcagttgcttatctcgtttcattagagcaatatggtaaatagttgaaaaggctgtaatcagaactaaactgaatgtaaaaactgcaacacgtggaatatatgcatctaatccgttgccatatagatgttgatataaatcgaatgcaacagctttatgctcggtttcttctacactgtgccataaccataggttgcgaatagtgttgtcggtcataagctcatttactgattgcatcatgctgactaccagaacagctgtatagtgttctaatccaacagttaccaataaattccattttttactaaaaactttctcaatagctttaagaacaatacctgtagctttctctagtgattctggatttaaaccatattgttgtgcactgacatggaaagcatgatgttctttagaatgcattgcttcttgaccaataaatgcgcctatttctctgtctagaatttcattctctttagctttagctcgtaaagcacggacagatctaacaaagtatgattcaccttcaggaaataaagtcgaaagacccgtgaaatagtgggtgagagaaggctcatgattgcaccaatagcgcggagtatcttcaaaattgtagtccatgcggcggacaggaaaagaggctggtgtacggtttaaagctgttttcattttcttgctccaatcttcttttagattaagttccaaaaaggaacttgttaataaaaattataagcagactagattggagtcaataaatttcgaatgattgaaaatagattgtcctaaaatgatagacaggagagctttaaagacaaaaagtaataaaattaaatttatttgtattatgactatttatataaatgcccaaattaaaaaaataatttgggcattcttgaacagaagcttagttcttaagtgctggtgttgcagcagcaatagcagcagcaacggcatcatcttctgtgttcgcaggttcagttgccttagcagctggttttgactgagctttttccggtttaggttcagctttaggctcaggttttttttctggtttaggttctacttttggtgtctcagatttaggttgttcagcaacttgtgtctgtgaagattcatcagaacgcgcaggacgagtttcacggcgaatttcagttgtcgtgttagcagtttcttcacgatgaacttcaacttgtggttgctcttgaacttgagcttcttgagtatctacactctctaaagattcaaattttgcaggcttctgtggttgaggttctgaaacagcagtttcaaccttgtcttgctcttcttctttcggtgtctcttttttaacgcatgcggttaacaatagtccagccgcaattgcagcacagattaaaagttttttatttgccattgccctaaacaacatttaattgaggaattggcattataacagtaaatagctatgaaaaaatcatgtcagattgagctaattttttattaaaaatgctgatagaataaccagttgtttattgttctttgaattgatgcggtttgactttgctttataggggcagagtacagtaaaattgccaaacattgtaggccgatttcggcttgattgtacgagaaacttaatgacccattttatttttgtcactggtggtgtggtttcatcgctaggtaaaggtatttctgctgcttctgttgctgcacttttggaagctcgtggcttaaaagtcacaatggttaaaatggatccttatattaatgtcgatccagggacaatgagcccattccagcatggtgaagtttttgttaccgaagatggtgcagaaacagatctggatctgggttattacgaacgtttcttacgtcgcgcgaaaatgaccaaactaaacaacttcactagtggtcgtgtatatcaagacgttttaaataaagagcgtcgtggtgattacttaggtggtacagttcaggttattcctcatattaccgacaatattaaagaacgtgtactccgcgcgggcgaaggctatgatgttgctatcgtagagatcggtggtaccgtaggtgatatcgaatctttaccgtttatggagtcggttcgtcagttaatggttgagctgggccataaacgtaccatgcttatgcatttaactttgttgccatatattaagtcagcagcggagttaaaaacaaaaccaactcagcactctgtaaaagagttactttcaatcggtattcagccagatattcttatctgtcgtactgagtatgatgttgatgctgacactaaacgtaagatcgcgttattcacgaacgtagaagctcgtgcggttgtcgtgtgtaaagatgcgaaaacgatctatcaaattccacgtggcttctatgagcaaaatgtagatgacctgatttgtgaacgttttggttttactgatttaccggaagctgacttaactgattgggataatgttgtagaagcattacttaacccagaatacacagtacgtgtagcaatggtcggtaagtatgttgaattaccggatgcttataaatctgtaaacgaagcattgttacatgctggtattaaaaatcgcgtaaaagtacaaattgattatgtcaatgctgaagagcttgaaagtcaagatgtttctattttgaaaacagctgatgcgattttagttcctggtggttttggtgagcgtggtactgaaggcaaaatgaaagctattcaatacgcacgtgaaaatagtattcctttcttgggaatctgtttgggtatgcagttggctgttattgaatatgctcgccatgttgcaggtatgccagaagcttcttctacagaatttaaccgttctacaaaatatccattgattggtttaattaccgaatggttagatgagcgcggtgaattacaacagcgtagccttgagtctgacttaggcggaacaatgcgtttaggtgcacaaaaatcagaattggttgaaggcacaaaaactcgtgaagtttacggaaaagctgagattaccgaacgtcatcgtcaccgttatgaaatgaataatcgtttcattgaagcgattgaacaagcgggcatgaagatttctggttattcttcagcgcaacatttagttgaaactgtagaaattcctgaacatccttggtttattgctgtacaattccacccggaatttacaagttcaccacgtgatggacatccattatttgctagttttattgacgctgcaaaaacacagcatcaaaaaagtaagtaatgcgattttaaaataaactgggaaagtttaaatgtcacaattaaaaccacaagaagttgtacgtttaggcgatatacaaatggcaaatcatttgccatttgtattatttggcggaatgaacgtactcgagtcaaaagatttagcttttgaaattgctgaaacttatattgatatttgtaaacgcctagatattccatatgtatttaaggcgagttttgataaagcaaaccgttctagtttgcattcattccgtggtcctggacttgaaaaaggtattgaatggttaggcgacattaaaaaacattttaatgtaccaattattaccgacgttcacgaaccatatcaggcagcgccagttgccgaagtcgctgatattatccagcttcctgctttcttaagccgtcaaactgatcttgttgaagcaatggcgaaaacccaagctattatcaacattaaaaaagcacagttcttggctcctcatgaaatgcgccatattttgcataaatgtttagaagcgggaaatgacaaacttattctttgtgagcgtggctcagcatttggctataacaatttagttgtagacatgcttggctttgacattatgaaagaaatgaatgtacctgtattctttgacgtgactcatgctttacaaactccaggtggtcgttcagattcagctggtggtcgccgtgctcaaattacaacattggcacgtgctggtatggcaacaggtttagcgggattattcctagagtctcatccagatccagacaaagcgaaatgtgatggaccatctgcattgcgcttgtcacagcttgagccattcttggcacaactaaaagaattggatactttagttaaaggattcaaaaagttagatactcattgatgcaggaatttgcatcgcgttattcattcaactgaggaattgttcatgagccaaatcgttgacattcgtgcacgtgaaattttggactctcgtggtaacccaaccatcgaagcagacgtcatcttagaatctggggtggttggtcgtgcatgtgcaccatctggtgcttcaactggttctcgtgaagctttagaacttcgtgacggcgacaaatctcgttacttaggtaaaggcgttcgtactgctgttcagaatgtaaatagctcaattcatgaattgcttgttggtcaaagtgtttttgaacaaaaagcgcttgatgaaaaaatgattgcttttgatggcactgaaaacaaatctaaattaggtgctaatgcaactttggcggtatctttagcagcagctcacgcagcagctgctgaacaaaaacttccattgttccaatacattgctaacttacgtggtcaaactactttgactatgcctgtaccaatgatgaacattttgaacggtggtgctcacgcagataacactgttgatattcaagagttcatgattgagccagttggtttcacttccttcgctgaagcattacgtgctggtgcagaagtattccattctttgaaatcagttcttaagaaacagggtttgaacacagctgtaggtgatgaaggtggttttgcgcctaaccttcgttcaaatgaagaagcgattacagtaattcttcaagcaattgagcaaactggttataaagctggttcagatattatgcttgcacttgactgtgcatcttcagaattctacaagaatggtcaatatattcttgaaggtgaaggcaacaagtcttttacaagcaatcaatttgctgattacttagctggtcttgttaagcagtatccaattatctctattgaagatggtttggatgagtctgactgggaaggctggagttacttaacttcaattcttggtgataaaatccaattagttggtgacgatttattcgtaactaatcctaagattttacaacgtggtattgatgaaaaagttggtaactcaattttgatcaaatataaccagattggtacattgactgaaactttagatgcaatctaccttgctaaagcaaatggttacaccactgttatttctcaccgttctggtgaaacagaagattcaactattgctgatttagcagtaggtacagcagcaggtcaaattaagactggttcactttgccgttctgaccgtgtttctaaatataaccaattgcttcgtattgaagagttaactaaagctgtttaccgcggtaaagctgaattcaaaggtttaaactaatcttttgaataaagctttatatatttaaatattgatgaaaaattaatatctaaatataagtgctatttctaagtgttagaaatagcacttttttatttaccctaagcgccgggtttttaaagattcagcccaactgtggtgatgacaacgagagcattcttgatctagcttatttaaaattttagtttcgccacatttcatacaggaataaaaagtattaattttaagaacttctgctttacgataagcatcagggaataagggaagtccccatttgacatcttcatcttcataataaagcaagctcagaataccatccgattcaagcagggctgttctgacttggcctaaatgttcaacgttttgttggcgcatttccgaaaaaaactcatcatgagaataggtctgtttttggaaatctttgtagactaaaagaccttctttaacgacacagagcgcttttccttctaataagtcttcaatttttttatgttttaccataccccaagtgacaagacgatatagagaaagaatagcgataaaagctatcaatgcatgggcaatcggtaaatccttagtaaacataggatcgccagcagcagaacctaaacataaaataatggcaagttcaaataaggagagttgccgaataccacgtttaccagatagccttagaaaactaatgataatgataaacatgatggtacaacggaccaaaatttctaaaacaaaggaccacgttgtgtcacctataagaatattagaaagatccatctttttctcacttgtttaaatatgtataaaaaatacatttaaaattcatatcagaataaaattaaaaaaatatactttttaagtggttattggttaaaaaattgatatatgtgtattgttatatgaaattaaaagatataaaactcatgtatagaatagaagggccgagcttgaaaaaaatgacgatacaactattaaattttaaaaaaattctgttttattaatttatcatcttgaataaaattccgaccggaatcaagcattgtaagtaatacaatatttaaactttggtcattggtggtaagaagatagtcttcatgttcagagaatctatttctttatatctttcaggagagcttttttatatttattgagacactttttttgttaattagaagtatttttatatgcatagattgatttataagcagttgtgttgataaacattattttcctttccaattgagttgaattttgacaaaatgaaacatgtcacaatggtcaatttaaagtaatatgaccattcatcgttttgcaggaactttgcaggaattttgcatgctgcttgtaaattgtcatacaatacaaaaacttaatcaaagtttttaattaaagctcttaatgctatgttagaagtatttcgttccacttcaagcaaacttatattgctactggttattgttttagtggctatattgcaatatcagttttggttaggtgagggtggttattttcctcatcaagcgcttatgcagcagattcaacaacaagccgaagtaaatgacgagcttaaagagcgaaaccgtattttggcagctgaagttttcgacctaaagaatggtacggaggcgatagaagagcatgctcgcctagatctaggtttggttaagccacatgagacatttgttcaaatgagtacaattagtactcattacaaacctatttatattgacccgaacgctaaagtagatttggaaactaatgagacacctccatcaccagacatcccagactaaattatgggcagttatccctgcggctggttcaggtagtcggttttccaaaactgaattaaagcaataccaatatattcaagatgctactgttatagaacatactgttaagcgtttaagtcagcttccgctgacgggttatgttttggcaattggaaaacaagatacttttgcctcaactttatcttttcaagataagcataaagcgcatttttgtaatggaggcgttgaacgtgtgcactcggtattaaatgctctgaattatctatcacagattgcggatgaggatgattgggtattagtacatgatgcagcaaggccttgtgtgacttttgaatgcttgaatactcttgttaaaaatgcaattgagactaatcagagtgctattttggcaattcctgtacgcgatacgctaaaacaagtgaatcaggaacagcaaattgacaaaactgtaagtcgagagctgttgtggcaagctcaaactcctcaaattgctaaaatcggaattcttaaaaaagcgatagaaacagcgctaaaaaataatttgactattactgatgaggcgagtgcacttgaatctataggagagagtgtactggtggtcatggggcgttctgataatataaaaattacttaccccgatgatttagaacttgctcgcttgattctacaatcacaaaattaagattttattacaggatagatggtaatttttagttataaaatagcctaagtaaatatggtgtttctacatatctattcaaaataattagtatttttttacaacttgtatttgtaagattgaataagtaatttacttagataatgttcgatagtcgaacaaaaaaatcctaaatcgaacaaaactatatatagctgactagatcaaaatctgaaaattatcaaaaatgtttaaaagggaaatctaagggaaacactcgggattgagtgaaatatttatctattcttctcgcctcagtgtgcctaaatctcttacctctctcttcttcaatgagcacaatggagttgtctaatgattgacaaaagtaagtcctcactaagcgaggttttatcgcaaattaaagatggtgcaaccattctgattggtggttttggtaccgcaggacaacccgctgaactcattgacggtctgattgatcttggcgttaaggacctgaccattgtgagcaacaatgccggtaatggcgattatggtctggctaaactgctcaaagccggttctattaaaaaagtgatttgctctttcccacgtcagtctgactcttatgtgtttgatgaactgtaccgtgccggaaaggttgaacttgaactggtaccgcaaggcaatctggcgtgccgtattcaggcagcaggtatgggccttggggcggtgtttaccccaactggctttggaacacttttggccgaaggcaaagaaacccgtcatattgatggtaaagattacgtgcttgagtatccgatcaaggctgactttgccctgattaaagcctataagggcgaccgctggggaaatctggtttaccgtaaatctgcacgtaactttggcccgatcatggccatggctgctgatgtcaccattgctcaggtttctgaagtggttgaattgggtggattagacccggaacacatcatcaccccaggtatttttgtacagcatgttgtacaagtacagcccgcacagtaagcaataaggagaaataacatgagctaccagaaactcagccgtgaccagattgcaaagcgtgtggcacaagatattcccgatggtgcctatgtcaacttgggtattggtttaccgaccaagattgccagctacttacctgctgataaagatgtctttctacattctgaaaatggtctgttggcttttggcccaccaccagcggcaggtgaagaagaccctgaactgattaatgcgggtaaagagtttgtgaccatgcttgaaggcggcagctttttccaccatggcgattcatttgccatgatgcgtggtggtcaccttgatattgcggtgcttggggcatttcaggtggcagccaatggtgacttggccaactggcacacgggtgcaccagatgcaattcctgctgttggtggtgcaatggatttggcagttggtgccaagaaagtatttatcactacagaccatgtgaccaaacaaggtgagccgaagattgtggctgagctgacttatccagttactggtaaacactgtgttgaccgtatttacactgacctgtgcgtgattgacgtgactaaagatggtttaaaggtgattgagaaagttgaaggtcttagctttgatgagttacaggctttaacaggtgcaactttgattgatgcgactcaagggtaaggaagtagggaaatgacattaaaaaacgcttatatcatcgatgccatccgtactccatttggccgttacgccggtggccttgcacctgtccgtgccgatgaccttggcgctgtgccgattaaagcactcatgcagcgtaacccgaatgtagattgggaacaggtcgatgatgtgatctatggttgtgccaaccaagctggtgaagataaccgtaacgtgggccgtatgtcagcattacttgcagggttaccttatcaggtgccggcaaccaccattaaccgtttgtgtggttcttcactcgatgccattgccattgctgcccgtgccattaaagcaggtgaagcgaacttggtgattgcaggtggtgtagaaagcatgagccgtgcaccttatgtgatgggtaagtcagatagtgcttttggccgtagccagaagattgaagacaccaccatgggctggcgtttcattaaccctaaacttaaagaattgtatggtgtagacaccatgccccagactgccgaaaacgtcgctgaacagttcaacgtcaatcgtgcagatcaggaccagtttgccttggtgagccaacaacgcaccgcaagcgcgcaagccaaaggctttttttctaaagaaatcgtggcagttgaaatccctcagcgtaagggtgatgcggtggtgattgataccgatgagcatcctcgtgcatcaaccacccttgaagctttaagcaaacttaaacctgttgtgaaagcagatggcacagtcactgcgggaaatgcttcaggtattaatgatggtgcggcagctctattgattgcttctgatgatgcagttcaggcatacaacttaaaaccacgtgccaagatcattgcttcaacagccgtcggtgtagaaccgcgtattatgggttttgctccggcaccagcgattaaaaaattacttaaacaagccaacctgactttagagcagatggatgtaattgaactgaatgaagcctttgctgcacaggctttagcagtgacccgtgatttaggcttaccagacaactctgacaaggtaaacccaaacggtggtgccattgctttaggtcatccacttggtgcatcaggtgcacgtcttgtgacgacagctttaaaccagcttgaacaaacaggtggccgttatgccttgtgttcaatgtgtattggggtaggtcaaggtatcgcattgattattgagagagtctaatcatgagccagttatatgccagcttgttttaccaaaaagacgtcactgaaatctttagtgattcatctttaatcacctacatgattcaggttgaagttgcgttagcccaagcgcaggcacaagttggcgtgattcctcaaaatgcagcaaataccattgcccaagtagctgaacaggcgttagaaaagtttgacttttcggctttggcggtagcaactggcttagctgggaatatcgcaattccatttgtaaaacagcttacggcaattgttaaagatactgatgaagatgcttcgcgttatgtgcattggggagcaaccagtcaggatattttagacacagcttgtattttgcaatgccgtgatgcgttgaatattgtggaaggtcaacttcaacagtgctacaccacagcattacaccaagctaaacaatatcgccatcaagtcatgattgggcgtacatggttacagcaagctttaccaattaccttagggcataaacttgctcgttgggcttctgcatttaaacgtgatttagaccgtatacaagctatgaaatcacgtgtgctcactgctcagttaggcggtgctgtgggttcattagcttctttgcaagaccaaggttcgcttgtggtcagcgcatttgcgaagcaactgaatctgactgtaccaacaagtacatggcatggtgagcgtgatcgtattgtagaaattgcaagtgtgcttggcatgattgtcgggaatacgggcaagatggcacgggattggtcactcatgatgcaaactgaaattgcagagttgtttgagccaaccgcaaagggtcgtggtggttcatcgaccatgccgcataagcgtaatccagttgcggcagcatccgtattggccgcggcgaatcgtgtaccagcactgatgtctagcatttatcaaagcatggtacaggaacatgaacgtagcttaggtgcatggcatgcagagtggttagcaattccagaaatctttcagctttgtgctggagcattaagccgtactggtgaagttctacaaggttttgaagttaatgctgagcatatgcaacagaaccttgagtgtaccaacgggttaattatggcagaagcggtgatgatggcacttgcacccaagattggacgtttaaatgctcatcatttggttgaagctgcatgtaaaacagcagtagcacaaaaccagcatttgtttgatgttgttagccaactagatgaagtaaaagggcagtttagccaagaagagataaggaatattttcaaaccagaaaactatttaggcaatattcagcaacagattgatgcggttttgaaagaagcacaaggagagtcaaagtgaaacagactattagcaatcgtcaaggaaaacagttagcagtttatacagattgtctaaaagatgctcctgtacttgtgttttctaattcattaggaacagaccatggtatgtggcaatctcagctgaatgaattaaaaagtcattttaatgtcattacatacgacacacgtggtcatggtgaaagtgatgtaattagtgacaccacattgcaaaacttagctgaagatgttgttgatattttagatgccttgaatattgaaaaagctcatttttgcggcatttcaatgggcggaattacagggctgtggttgggtattcatcatccaaatcgttttaatagcattacagttgcgaactcagcagccaaaattggtcaaaccgaggcttggttaagtcgtgctgaatcggtagaaaaaaatggtttagccgagctagttaaaactacccatacccgctggttcagtgaaaaatttgactatcagcataatgtggttgcacagacaacgattcaaagtctcgcaaacacgccagcacaaggttatgccaatgcatgtcgcgctttagcgtatgccgatttgagaaatgaaattgcacaaatccaaattccaacgctactgattgcaggaacagaagatccggtaacgacagtagcagatgccgaatttatgcagaaggcgattaataacagtcagcttgcaaaactcgaagcatcccatctttctaatattgagcaaccacaaagatttactcaggaattgactagatttattcagcaaatctaatcgcttagtaatttaaaaggaattggccttaaggaggcaagtatggcgtctcaggattacgctacaccaagcaaaagcatcgatgctcaagcactgattaatgatgctccacttagtaaatatcaatggatgatcgcaatcatctgtttcttaattatttttactgatggtattgatacagctgcaatgggttttatcgctccagcattggctcaggactggggcgtagatcgctctcagttaggaccagtgatgagtgctgcacttggtggaatgattattggagctttagtttctggcccgacagctgaccgctttggccgcaaaattgttttagccttttcgatgcttgtatttggtgggttcaccttggcatctgcttatgcaaccaacttggatagtcttgtcgttttacggtttttgacaggtattgggcttggcgcagctatgccgaatgcgaccactttattttctgagtactgtccaacccgcattcgctcattactcgtgacatgtatgttctgtggctacaacttgggtatggctacaggtggttttattagcagttggctgatcccgacctacggttggcatagtttatttttgctcggcggctggtcacctttaattttaatgattttagtgattttggtgttacctgagtcttaccgctttttaattgtgaaaggcaagaatccagaaaaagtacgcaaaatcttaaaccatattgcaccagcacagattcaaaatgcgacagcatttcatgtgcctgaagaaaaaacagaagttgttcaaaagaaaaatgtctttggaattatgttttctaagccatatgccaaaggtacggttttgctttgggtgacttacttcatgggactcgtggttgtttacttgctaacaagttggttaccaacacttatgcgtgaaacaggtgcttcgatggagcgcgctgcatttattggcggtttgttccagttcggtggtgtggtgagtgcattgtttattggttgggcaatggacaaattcaacccgaaccgagttatcgccattttctactttgccgcaggtctatttgcaattgctgtcggtcaaagcttaggcaactcaaccttacttgcagtattggtactttgtgcgggtatcgccattaatggtgcgcaatcttcgatgccggcgttaagtgcacgcttctatccaactcagtgccgcgcaactggtgtgtcttggatgacgggtattgggcgttttggtgcggtatttggtgcgtggattggagctgtgttactcggtaatgattggtcgtttaccgccattcttagtttattactcattccagcgaccgctgctgctgttgcggtatttattaaatcaattgttgcgcataccgatgcaacttaatagaggtctatcacaatgaatgatgaacaacgctataaacaaggcattgaggtgcggactgaagttttgggtgaaaaacatgttggtcggtctttgcagaacctaaatgactttaaccaggatttccaaaattttattagccgttatgcatggggtgaagtgtggtctcgcccaggcttaccacgtcatacccgtagtttagtgactatcgcaattttattggcactgggccgcgaagatgaactacgcatgcatttacgtgcttgtttcaacaacggtgtaactaaagaagatttaaaagagctgatcttacacagttcactctatgcgggtttacctgctgcaaacgctgcaatgcatatggctgaagaagtctttaaagagttggggatagaagtaaacccaattgcagcgaaagaacaggattaaggagataaagatgtcacaacatagctggggtgcttacgcccaacgtaatacagatgatcatccaccagcgtatacgccaggttataaaacaagtgtattacgttcgccaaaaaatgcattgatctcaattaatgagactttaacagaagtcactgcgccgcatttttcttcaaatctgtttggcccaaaagataacgatttgattttgaactatgccaaagatggtttgccaattggtgagcgtgtcattgttcatggctatgttcgtgaccaatttggtcgtcctgtaaaaaatgcacttctagaagtatggcaagccaatgcttctggtcgttaccgccatccaaacgataagtttattggtgcaatggaccctaactttggtgggtgtggtcgtaccttaactgatgaaaacggtttttatattttccgtaccattaaaccgggtccatatccatggcgtaaccgtattaatgaatggcgtccagctcatattcatttctctttaattgctgatggttgggcgcagcgtctgatttcgcagttttattttgaaggagatacgctcattgacacttgcccgatcttaaaaacgattccttctgaagatcaacgtcgtgccttgattgcactagaagataaaaataactttatcgaagcagatagccgttgttaccgttttgacatcactttacgtggacgtcgagcgacttacttcgaaaatgatttgacttaatcgggagcacgagcatgaacaactggaattttcaggaattaaaagaaactccatctcaaacaggtggtccttacgttcacattggtttattgccacaacaggccggtattgaagtttttgaaaacaactttaataaccagttggttcaagaccaaaccaaaggtgagcgtattcgtcttgaaggtcaagtgtttgacggattaggtttaccgctacgtgatgtactcattgagatttggcaggccgacgcaaatggtatttatccaagtcaggcagatacgcgtgagcaaaaagctgatccggcatttcaaggttggggccgtacaggtgcagactttgaaacgggtgtttggagctttaatacaattaagccgggcgcgacagcaggccgtaaaggttcaactcaagcacctcatattgcattagtcattttcgctcgcggtattaacttgggtcttcatacacgagtttattttgaagatgaagcagaggcaaatgctaacgatccaattctaaatagcattgaatgggcaccacgtcgccaaacacttattgcgaaacgttttgaagaaaatggtgaagttgtttaccgctttgatattcgtattcaaggcgatgacgaaactgtattttttgatatttaagaaacacctaaggctacacctgattattcaaggatgcgtgtagcctttttaaggatgaacctatgaacatgaaaacattattaagcctaagtttgcttgcactcccattttttactgcacaggtaaatgctgaacctgttgctttagctgctcaggcacaacctgccgctacagccgttaaaacgattgttccgattaccgcaaaaactaaagaacaagcattggcacaagctcaagtcattgcaaatacggcagatgctgatttagcagagttccgtatcgatttattaagctttgccagcgatacaaaacaagtgattgccttgggccatgagttgaaaaagattttaggcaataagccaatgattgccactattcgtacaaaaaacgaagggagtcagcttgaaattagtgatgctgattatggtaagacttatcaggcttatttaaaaaatccgttcatggactggttagatgttgaaatgttccgtgatcaaaaagtagtttcagaaattgttcaaaaagcacatcaaaagaaagtgcttgttgtcatgtctaatcacgacttccaaaaaacaccaagccaagatgaaattgaaaaacgcttgttaaaacaagatcaaatgggcgcagatgttctcaaaattgctgtaatgcctaaatctaaacaagatgtcttcactttaatgaacgcaactttaaaagtaagccagcaaaccactaagccattattgacaatgtcgatggggcaattaggtacgatttctcgtgttgcgactgccaatatgggcggaagttatagctttggcatgattggtcaggcttctgcaccgggtcaaattgatgtgactaagctcaaacagattttacaaaccgttcaaccaacaaacccgtaaatcataaggatatgatgaaatgaatacattacgtttaactactcttgcattaggtttgatggtttcaggcatagctgcggctcaaacttatgtggttgaccgttatcaagacgatagcaataaaggctctttacgctgggcaattgaacaagccaatgcaaacccaagcgaagctagcgaaattttgattcaagcagtaggcaaagcgccttatgcgattaaattaaatagtgcacttcctgaaattaaagcacctgtcaaaatcattggtactcagtgggataaaactggcgaatacatcgcaattgatggttcaaactatattaaaggcgaaggtgcaaaagcttgtccaggtgcaaaccctgagcagtacggcaccaatgtacgtactatgactttaccggggttggtattacgtgacgtcaacaatgtcactttaaaaggtttagacattcatcgtttctgtattggggtattgattaaccgttcaagcaataaccttattcaacacaaccgtattagtaataactatggtggtgctggtgttatgttgacgggtgatgatggtaaaggtaacccaactgcaaccacgactaataacaacaaagtcttagataacattttccaagacaatggtgatggcttagaactgacacgtggtgcagcatttaacttaattgcgaataaccattttgtttcaaccaaagcaaatccagaaccatcacaaggtattgaaattttgtggggtaatgacaatgccgtagttggtaataaattcgaaaactattcagatggcttacagattaactggggcaaacgtaactatatcgcctataacgaaatgaccaataactcgattggtttcaatatgacgggtgatggcaacattcttgatagcaataaagtacatggtaaccgtattggtgtagccattcgctctgaaaaagacgcaaatgcaagaattacattgactaaaaacctgatttgggacaatggtaaagatattaaacgttgtgaagcaggtggttcatgtgtaccagatcagcgtttaggggcaattgtatttggagtacctgcacttgagcatgaagggtttgttggttctcgtggtggtggtgtggtgattgaaccatctaagcttcaaaagacatgtactcagccaaatcaacaggactgtaatgctcagccgaatcagggtattaaagctcctaagttaacagcgaataaaggttcagttacagtagaagttaatggtttaccaaaccagcgctatcaagttgagttttttggcaaccaaaatgcagcatcaaaagaagctgagcaatatttaggaacaataacagtagctacagataccgaaggtaaagcaaaagccaattggaaaccaacagtcaaagttgcctcaattacagcaaatgtgactgatcgcttcggtgctacatctgagctcgggtttgtgcaagttaaataacaaaaaataaggcgcctcaaaacaggggcgcatttcagaaaagacaaaagggacttgaaatgccaaatgtaatgaaactgagtgtgctaacaattgctgtattgggcagccaatttgcacttgcaaatgagccatggtcacaagaccgtcaatggttgctaggcgactggaatggaaaacgccagcaattagagcagcagggctataaatttacggcttctattatgagccaaagtgccacaaatttaaatggtggttacaacgacagcaatacttttgaaaatgctgcacaactttctttaggtgcaaacctagatttagaaaaaattgctggttggaaagatacaacagcgagcctagtcgtgactaaacgtgacggcaatgcattaactcttgagcgtattaaagacccacgttctagccaattgggcaatgctcaagaaatttatggtcgcgggaaaatttggcgtttatcccaagcatgggtgaagaagggctttgttgataatactgtacaggtcaaatttggtcgtatgggaatgtcagaggactttaatagttctcaatgtgagtttcagaacttattgctttgcggtgggcagttaggaaaatcaattggttcaatttggtataactcaccagtcggtgtttgggctacaaacgttaaatatcagtttgcacctgaatggactttaggtgttggtgtgtatgaggtcaatctagacaatattaaaactgaatcaaacagtgatggttttaatctggatatgaataacgtcaagggtgctaccataccagttgaacttgcatggaaaccaaaacttgctgcttttaatggtttaccgggtgaatataaagtaggtgcgctgtactcaaccgcagaagcaaatgatattaaaactgcgggtaaagtgcatgacggaaaacaaagcttctggattaatgcacagcaacaacttagccatgccggccaagatccgaaacgcggtttatatgtcagttttaacagcgttgtaaatgataaagcaacgacttttgttcaaagtacgcaacagcttgctctttggtataagggaccgtttgatagccgtccaaatgattcgattggctttggtattgccaattatgtagtcaatgatcgtgctaaagataaacagatcgcgacaaacgaaagccgcggatactatagctatgatccgattgcatctgactatattccaattcaagacgacgagttaaatgtcgagttgaactatacctatcaatggtctccggccgtcatgttacgtccaaacattcaatatatccatcaacctgctggtgtgaaagaagtcgatgatgcttgggtggcaggcctgagtgtaaaagttaatttttaataatattgatggctggttagacatagtttaactggccaaaatgcttgaactattcgggttcagtatatgtggagtaggatctatgtctgagtcagattctaagtttcatatcttattcaaaatatggtgttttattttaggtttagctttattggctactggtattttttatatcgtgggcggtggaaagctagtatctctcggtggttcctggtatttccttatctcaggactgtttataaccatttcagcaattagtattttccgaaaaaaagcgctgggcgtctggatttttgcggctgtttttgttggtaccgtaatttggtcactcattgatgctggatgggagttttggccgttattctcgcgcttaatgtttcctgctggtctttttgctgcgttgttatttaccttaccttcaattcgacgctaccaatttcaaactagtttggcatcttcagcctatgccgtaggtggcttagttgttgtgggaatgttgattgcgctctatcaaatgttccaaccgcatccaacagtagcaagctcaggtgaaaaactacctttagtaccagttgacccatctaaaaaacaggtgaattgggaaaattatggaaatgatgcgggtggtagtcgctttgttgctctcgatcaaattaaccgagataacgttcataaactaaaagaagcttggcgctttagaacaggtgattttacaacgggtagcggtaatggtgccgaagaccaaatgacgccgctacaagttggaaataaagtctttttatgtacgccacataacaacatttttgcaatagatgccgactcgggcaaacaactctggaaagctgaggtgaactctacagccgatgcttgggaacgctgccgtggtgttgcatacttcgattcaactaaaccactggtgcaaccaactttagctggtgcaactccggtcaatactgttgccagcaacacagcctgtccacgccgtgtatataccaatacgccagatggccgtttaattgcagtcaatgcagataatggtcagcgctgtgcggactttggtgtaaatggaacggttgatctactcgaaggcctaggcggtgggactaaggctccacgttttgaagtgacttctgcaccgactattgctggaacaactattgtggtgggtagccgtattgccgacaacgtggcagcagatatgccgggtggtgtaatacgtggttatgacgtgattacgggtaaacttcgctgggcatttgacccgcgtaatccagatcctaactatgttcttaaaccgggtgaaacctataaacgtagttcggcaaactcttgggctgcaatgtcatatgatccacaaatgaatacagtgttcctaccgatgggtagttcatctgttgacatttggggtggtaaccgtaatccgttagatcacaaatacaatacttctgttttggcacttgatgcgacaacaggtaaagaaaagtgggtatatcaaactgttcataatgacttatgggactttgacttaccaatgcaaccaagtctagtcgactttccattaaaagatggtacgactaagccagctgttgtgattggaaccaaatcaggtcaattctttgtccttgaccgcgtaactggtaaaccgctaactaaagtgattgaacaaccagtgaaagcggcaaatattccgggtgagcaatatagcttaactcaaccgcgttctgttgaaatgcctcaaatcggtaatcagactttaactgagtcagatatgtggggtgcgacgccgtttgaccaactgatgtgtcgtattaactttaagtcaatgcgttacgaaggtttatttaccgcaccgggtactgatgtttcattaagcttccctggttctttaggtggcatgaactggggtagtattgcttttgacccgacacatcgttacatgttcgtaaacgatatgcgtcttggtttatgggttcaactcattaaacaaacacctgaagatattaagattcaggcgagtggtggcgaaaaagtaaatacaggtatgggtgctgtaccaatgaaaggtacaccatataaagtgaataaaaaccgctttatgtccgctttaagtattccttgtcaaaaaccaccgtttggtaccatgacagcaattgacatgaaaactcgtcaggttgcatggcaagtaccacttggtacagttgaggacactggaccacttggtattaagatgggcttgaaagcaccgattggtatgccaactattggtgggccaatggcaactcaaggtggcttagtcttctttgctgcaactcaagattattacttgcgtgcttttgattcatctacaggtaaagagctgtggaagtcacgtatgccagtaggtagtcaaggtacaccaatcagctatgtttcacctaaaacaggtaaacaatatgttgtggttaccgcgggtggtgcacgacagtctccagaccatggtgattatgtgatcgcatatagtttagagaaataatgaaagagggcaaaaggataaattttcttttgcccttatttttttaatatcttttttctattagagtgtttgcgtaaattctgtaattttagtgagatagctttaccaaatagtaaaaaagtgcttgaagttattgctaaacttaaaatattcctataattgattcatcctgaacactagatatagccgaactattaagcatttttttataatgttttacctataaataaaatttcaaaatttattaagttttgtttaacttaaagttgtgaattttaattaaaaataaacattattgagtttttaactctaaaaaacaggttttttttgttggaaaaacgagcgtaaatatatacttatattatatttaaataatgtattgcattaagatagaatggtcggcgcaggttattactacccagtaataatttgtatttcaggaatttaagctttaattggcttaaggctcatctaacgatgggcctttttttatgtgctttatattttaattttcttgataactaaaaatagcctaagtaatagcaaataaactatgaaaaatgagtctttaatgacaatttgcatatgatttgttagattaatgccacttgataataataggtgatgtaatgagatttttagttcttgcaactttatccggtttggctttaatgggttgtgcttctgttcaacaagcacctaatacacaagaaaccattcgttatgcttctagtccatgtttcggcgcatgcccaatttactcagtagaagtaacacctacaggtttaattcgttttgaaggtaagcaatatacaaaagcaattggcgttaaagaaattcaaggtagcgtaaaagattatcaaaagcttgctgatgaattaaaaacttatcgtccgcaaacaggaacccaatctaaaactgcaggttgtcagcaaactgcgaccgatatgcctagctattacatcacctggattcaaccaaatggtacagaaacaaaattaagccattacacaggttgtatctctccagcaaataatagattaaataaagttatggaaaaattacctgaacaattaggcattaaagatctaatttaatgataaaagcctcaaaatcttggggctttttcttgttaagaagaattataaacttaaaagttttatattaagtatttctaaaagaatcagcgtataatacagattataaaaacatatattgttaagagtgcttatatgtcaagtattgtctatgcctttgtgggtggtttattactcggtattgcaacagttgggtatttatatataaatggtcgtatagctggaattagtggtttgcttgctcaattcattagcccatctagagatatatttaaaagttctgcattctggttcatagcaggactcgtgattacacctttcatatatggttatttctatcagcctgaaatcgaaattaaagccaattcatttgtacttattctggcagggttacttgttggttttggtacacgacttggatcaggctgtacaagtgggcatggcatttgtggaatgagcaggctatcaaaacgctcaataatagcgaccgcagtttttatgtttgctggcatgctgactgtttatatcattcgccatgtgctggggtaatcttatgaaaaatatctttgcttttatatttggtggtttgttttcattggggttaatgatttctggtatgtctaaccctgcaaaggttttagggtttctagatatttttgggcaatgggatattagcttaatgtttgtgatgctaggtgctattgctgtggcatttattccgtttcaaagggctattaaaaaaccaaaaaccatttttaatgagcaaattcaattaccaacaaatacacagattgaccaaaggttaattgtgggtgcttttattttcggtataggctggggaatagcaggtatatgtccagcgcccgctttaactcttattggattaggacattttgaagcgctttattttattgtcgcgatgttagtaggaatgtttatttaccgaattttaaataaaggaaattaaagctatgcaacaacctctagtaaaagatttttttgatgaaaataccaatacttttagctatgttgttgcagatttagcgactcgtcaatgcgcaattattgatagtgtgcttgactatgatgctgcttcggccactacaaaaacaactaatgctgatctgatcgtcgattatgtcttggcgcaaaacttcaaagtacaatggattttagaaacccatgtacatgcggaccatatgactgcggctcaatatttaaaatctaaattgggcggtacaattgcgattagtcaaaaaatctcggtagtacaagaaacattttcggctatttataattttgattttaagaaatttaatgaaaatcaaccttttgattatctatttgaagattatgaacatttcaaaataggggaaatagatgcctataacattcctacaccagggcatacacctgcttgcttaagctatgtgattggtgatgctgtttttgtcggggatactttatttatgcccgattatggttcggccagatgcgactttcctaaaggaagtgctgctgcactttatgattcggtacaaaaactttatacacttcccgacgacatgcgtatgttcttatgccatgactataagcctgaaggccgtgacgaatatatctgtcaaacagatataaaaactcaaaagcaaagcaatatccatttaaatcgacgagtttccaaagaatcattcataaaaatgcgtcaagaaagagatgctactttggcaatgccaaaattaattctgccttcaattcaaattaatatgaacggtggaaattttccggaacctgaagcgaatggcatccgctatttaaaaatcccatttaattacttttagaaatagcctaagcaaaaataaaattaatcttatggaaatagcctaagtaatatttagagaacttgtcttaaatcccgcgcagtctcttgcaatagcggcaaaatatgttgaattaaatattcttcagttgttctcatggttggagaaacaatatttaaggcagcaactactttaaagtcttgtccataaatcggtacggcgagcgcatgaacacctaattcatgctcttcacgtgaataacaccaatcttgttctcggatttctttgagtaactctaaaaatttatcattttcgacatgcgtatatttagttaaacgctgaagcggatatttttggagccagtccaattgttcttcttggcttaaatgtgccagtaaaattttacccgccgaggttgcatgagcaggtaagcggttacccaaatgcaaaccatatggatttacgcggtcggtttgttgatgcgcggcactacgggcaatcgtaatggcttcataaccatcaagtaccatcaccgaataaatgagagaggtttggttagttagaagatttaataaaggttgagatacttttggaagctgagctgcacctaaataagctcctgaaaatttgagtactttaggggttaaatagtaatagtggccatctgattcaagataccctaaatattctaaagttaataaatggcgtcttgctgccgctcgggtaagcccagttttttcagcagccatagaaatgtttaaacgatgttgattactactaaagctatctaaaatcgccatgcctttaccgatgccagcaatgtaatcttcatgacgaatcgtttttttgttgtcctgattctggattatccgttcatctttactcattactggtccttgtacgatagaagcttaatagatcaattcgctttactgaaaaagtttaataatttcatgtcgcaaaaattgatgtcttaaattatcccttaaatcttcgtgccaaaacatacccattttaatattggtcatctcaaaaggtagagaatgtaaccgaatctcaggactataagataaatgctgcaaaatcatacggggcatggtaagtattgcgtcggcttgggctcccaaaacttgtaacgccgttgagtagttttgacagcgcataaatacatttcttgaaattttttggtgttggtttaaataaatatcttcaagtaaagcgcccgtacggcgtgatgaaacaccaatgtgccgtccactgatataactagctaaatcgacttctttaagttggctgcaaataacgaactcatctgtgaccaaatgatcaaaggtaatttttggagataagtattgttctagatcaatcacgaaatcgagctgctgtgtcgctaagtctgccataatatgttttcgatctagcttcatactgacaaactgcaaatctaaattaagattttgaaaatgttgagccaatcttggaagaataattggctcaatttcatcatgcacggcgatttttaagctttttaaactggttgggtcgaacacatgtctctgttggctaatattttgaatggttaaaagtgcttgcttaacagttggataaatctgttctgcaaaaggcgttgcagacattttattgcctacacgtataaatacttcatcttctagttgttgacgtaatcgttgcaaagcatgacttgctgccgattgcgtaatattgagactacttgccgcatttgaaatacttttttgctcataaatcgcgataaaaagcggatataaattaatatcaattcggtgaaaaaaacttaagtctagaccatgtaggttatgaatattattcatgatgcattatttaataaaatcatttcattcatattaagtttcaagttatgttgatgtaaagaccagataatgatgtaaaggaaaaagaatgtttgaactctcaaaaaaagctcaggattttgctgagcgaactaaaaaatttattcaagaagaaatagaacctgtcgaagcaaaattttgggaagaagttcatgagttaaatccagatggaaactggaaaaaatggcagtggcccgagcttttagaaactctaaaatctaaagctaaacaggcaggcctttggaatatgtttttacccgatgaaaagctaggtgcagggttatcagttcaagaatatgcacatattgctgaattgactggtcgtagtttattggcgcccacggtttttaactgtaatgcaccagatacgggaaatatggaagtgttatggcgctatggcagtgaacagcaaaaacaacaatggttagagcctttattggatggaaaaattcgctctgttttttgcatgactgaaccagatgttgcatcaagtgatgccaccaatatgcaagcgaccgcactcattgacggtaatgaaattgttttaaatggcaaaaaatggtggtcgtctggtttaggtgacccaaatgctaaagtcattatttttatggcccatactccagatgaaactaaagaccgccattatcaacactctatggttttagtaccgattgatacggcgggtgtagaaattcaacggatgttacctgtgtttggtgactatgatgcgccacatggacacggtgaggttcactttaataatgttcgagtgcctattgaaaactttattggtggagcgggtcaaggttttgaaattgcacaaggtcgtttagggccggggcgtattcatcattgtatgcgctgtatcggagctgctgaaaaagcactagagcttatgattgatagaggcatgtctagaacggcgtttggcaaagaaattctaaaactcggcggaaacctagagcgtgtagccgatgcgcgggtagccatagatcaagccagacttttaaccttgtatgctgcttataaaatggatactttaggaaatatggccgctttaacagaaatatctgcaattaaagtggtcgctccaagcgtattagaaaaagtagtcgatatggcgattcagctacatggcggtgcgggcgtttcaagagatacaccattaacaggtttctttgctcaagcacgcagtttacgtttagctgatggtccagatgaagtacataaaggcatgattgccaaattagagttggccaaacgtggttatggtcgtcataagaaagtataagtttaaaggaagtgaatatgtcggtaattgatgtaggcggtgaagtacgtgaaggtgaagagcttgatattggggcagttgagaactggttaaaaaaccaaggtgttgagttggttggtccagcagtcgttactcaatatacgggcggggcgtcgaattggacttatcgtttaaaatatgaaaataccgatttaattttgcgacgtcccccaaaaggaacaaaagcgaagtcagcccacgatatggcccgtgaatatatggtgcagaaaaatcttgccccttattatccagtgcttcctaaaatggttgcactttgtcaggatgaatcggtcattggctgtgatttttatgtcatggaacgcattgaaggcattattcctcgtgcaaaattaccgcctgagcttggttttaatgaagatgatgttcatgagctttgtgtaaacgttattgataagttgatcgagctacatcaagttccttatgagaacacgcctttagctgaactaggtaaaggtacaggatattgccgtagacaagttgaaggttgggataaacgctatgaaaaagtccgcacaatcaacgttccttcatttaaatatgttcgaaaatggctaaacgataatatccctcaagattctacaacttgtattattcacaatgattggcgttttgataacgtgattttagatccagaacatccaactgaagtgattggagtgctggattgggaaatggcgactttgggtgatcctttaatggatttaggtagtgctttggcctattgggttgagcctacggataatatgatttttagatcgacacgtcgtcagcctactcacttaaagggaatgttctctcgcaaagaagttgttgactattatttgcaaaaaactggtctggagcctcaaaactggactttttatgaagtgtttggtgtattccgtttagcagtgattgcccagcaaatctattaccgttattaccataaacaaacaagaaaccctgcttttaaagatttctggatagtgattcatgcactacatatcagagctttaaaacttatcgcccagcaaaaattgcaagaatcggaatttgctcagcaatctctacagaaaatacagggtattttaagaagatgaccacaatttatctggtaagacatggtcaggcatcatttggtaaaagtaattatgatgagttgtctgaaaatggtgaagctcaggcgactttgttaggccaatattttaagcaaatattgaaagaacaaccttatgtggttgcaggaaccatgcagcgccacgagcaaactgcaaagctcgcactcaatgaatgctttccagatgcggtgattcatcataataatttatggaatgagtttaatcatcagcaggtttttgcccgttatgagccgcgttttgaacagcctgaactgttaaaagccgatgtcgcaaaagagcataaccctcgcgcgtatcttgccaaaatctttgaaggtgcgattgaacgatggaccgacggcgattttcatcatgaatatgatgagtcttggccacactttaaagaaagagtcgaaacggcactacagcaactttgtgatgagttagcaaaaaacaaacctcgttatgcagtcgtttttacctcgggtggtgtgatttcggtagcaattggcaagctgcttgaactgagccctaatcgaacttttgctttgaattgggcaattaccaatacaagcctcacgactttacgtttagttggaaatgaagctcaggttttaagtttaaatgaacaccattttataaaagctgaacgtcccgatttactgacatggatttaaaataaggataaaagcatggcaaagacaattttaattacaggtgcaagttctggtttaggcgcaggtatggcgcatgaatttgcagcgaaaggttataacttggcgatttgtgcacgccgtttagaccgattagagactttaaaaaccgaactagaaaatcagtacggtattaaggtgattgcaaaaagtctggacgttaccaattacgatcaggtttttgaagtttttcgtgcctttaaacaagaatttggctatttagaccgtattattgtaaatgccggagtcggaaatggtcgccgtattggtaaaggtaattttgaaattaacagagctacggccgaaacaaactttatctctgctttagcacagtgtgaggcagcgattgaaatttttagagcgcaaaatgcaggtcatttggtggtgatgtcatccatgagtgcgatgcgtgggttaccaaaacatttatcgacctatgcggcgagtaaagctgcagttgctcacttggccgagggtattcgtgctgaattactagatactccaattaaagtctcaaccattttcccaggttacatccgaactgaaatgaatgaaggtgctaaacatctaccttttgaagtcgacgccaaaacagggtgtaaagctttagtcaaagcgatcgaaaaacaacctgtaaaagcttatgtaccgcagtggccgtggttaccaatgagtattgccatgaaggttttacctttgagattggttaataaattaggataaaaaattaccccctaaaattagggggtaatttttatttagaattttttggtgtaattgacgaataaacggtcttcgccaaagtcattgccgtgtttaacgttgtagtcaatacgaatatattgcagggcaaagccttttaagagcggctgctgaaatgtatagtttaaaatcacattagactcagtttcgtggtttttctcaccattagctgctttaaagtcatgaccgtaaacatatttcaccattgcgtttaagcccggaacgtaatctttaaagtcatagccatacatgacatggtaggacttttcatcttctttgaaaaagcctgtggcattccagttaatgaaataagtttctggtaagaagccatctggtagcgggtaagccgactcaccaataatttgttggtaacccaaaccaaaggtatggttttttattttaactgtttcaagtaaaccaatgttctgggcatcaatatcaaaggtattgccgtcatctttcgcattaaagtatttaaatttggaggtcagggcaaaagttggttgtttccacgtatgctcaagccctacatagtgtttattgtagagatcttctaaattaccaaaatagtattcgcccttcaaagacggcgtaaactgatagcgcaggtcaatataatttaagccatcagattctttggtcattccatttgctgtgaacgaaaactttttaaaatcttcttcatttcgtggcgagactttttccacacggccaatttctgcgtaaagttgatctgaaagttgtgatttaagattggttccccaatacgaggtgagtaactggcggctagcatcaaccgccgttacaggtaaatctagccagagttcaccaacacttaaaagtgttttgtcataacctatttttaaagtcgcgccgtattttagatagtcagatgcttgagattgcgtttctttattaaaaggcaaaacagtatctgcgacatgtttgtctgaactcaaacgtacggcgtattgaacggaagcgtcagctccaatcgtaataggtttatctgctatgactagtggagtgtcatgcattttcgatttataaaataaagatgctgcctgagaccaactaccggtatctttaaggacgtcattatcaaaatcacgattgatataggcattttttaaagtgaatttccactcatcttcagtttgctgatttggatttgcagcccaagaactgctgcacataataaataaagtggcaacagctaaagtgtgtggtttaaaacggtgaaataattccataatccatttccaagatatatgccagtcctcggcattacgtattgtgaaatattggtgtggtgttccctaaattgtttaaagggaactcctgtttttataagtggctgttgcttcaattaatgtaatttttcaagcttcatgctttcactaaaggatttacagcctttaaaaagtagagccaaagccagtacacaggacaaaccacccacaatagataaagaagaacccaccattaatggattgccaaaaaacttatctgtaataattgcgactaatgttgtaccaacacctagtccaattaagttacttaccaaaaggaatagggcagaaaggcgtgctctaaattggttcggtgctaacatttgcaatgctgttgctgaaatcacaagtgggaaggaggcaaagaacattgcaggaatgagcaaagttactgaaagccagagttgatctgtttgggtaaaaaatgcaattggaataatcaggccaacaataccaatcacacccgtgaacatcggtgcatcttggcgtccttttttaataaaccagtcgtttagccatcctgcacaaaacacgcctaaagtatttgcaactagcaatatagtgccgagcatatagcctgtttcagtcggcgcgagttgaaacttacgaatataaaatgctggtgtccaactagtcagactgtagagtgccattgcataaaaggtaaaacctaaatagtgacaagcaaatgtttttgcatgtttcttgataaactgaaggcactgcgtgaatttaacttggtcaacttgtccgctttggttgagctgctgtcctttacgtgcaggatctttaactgtcaaaataaatagcaaaccaataataatgccgggtaaccccaccactaaaaaggcaatttgccatgccttgagtgcacctaataaaggaacttcaatgagtgtcacgcctttaagcaggttaatcacgtaaccgccaactaaaaaggcgatacctccacctaagaaagcaccaattgaatagatcccgaccgcgcggcctagtttgtctttactgaacatgtcactaaacattgaataggccgctggagataaagctgcttcaccaacgcccacagccatacggcttaggaatagttgaataaagtttttacttaaaccgcaagttgctgttgctaagctccagacaataatcccgattgaaatcagttttggtcgggaaaaacggtcggcaatataggctaatggtaagcccatcacagcgtagaatagtgaaaaggcaaggccatgtaacaagctaaattgagtatctgaaagttgaaggtctgctttgatgggttcaatcatcaacgctagaatttgacggtcaataaatgaaaaaatataggccaacatacaaagtatgaccacataccatgcatatgcattggttttcttttgtgtcctttcaacagcgatattactttggttcatacacttaatccttatgtataaaacgctttaaagaaattgatctctagcttctattcatcctcaaaatttttgatacgtccccatttgaaatgaataatgaaacggctagaaatgattgaatttggtttggtaaggggccttggagaaggtgacttaacacaaacggaaatagtaatgctgactaaattattgaattattattttctttttatatgtaaaattccattacttattgagtatgtttagatacctaaaaagtatgttaagtgagctattgggagggtttaactgttataaatatttgaatttaataaattttattatttatattggattttttatagtgagcagctaaagaaagactagctttaactgctctagagccaagttaatttagtgtcgatggaaataattaacttgatggcatgagatcaaataatttttttaactgatgatttagattatgcagttcatcttctgaaaaagcattgaggatccccgctaaggtaaccacactaatttggttaatctgttcaaccagctcaacacctttggccgttaatttcaccatcgaaatccgttcatcagcggtagaagagtagacttccacaattccatcttctaccaaacgatatacagcctttgttgctgtggtgagttttaaagtagaaagattggcaatgtcagtgatactggcttccccaagcgcattagtgcttaaaataattttgcggcgagtattatcaatgccaagtttctttatagatttttcaataagttgtgaatatttaccattaacttgggaaatccaaaaaaaggggaagttttgaatactcgacggttctttattgggaagaaattgttctaaatgatcaagcatagctaagcaataacttagtaaaaaaagggtaattctattataaacaaaattttgcatatttccttgaacacacattagaaaaattacttgacaattccattaaattttctgatattttaattaatggataaaaatacatggaaaagtgaatgaatattattagccaaagtgtgcaaaaaggaagcggcaaacttaaggtgatggtgaaggacacaattgatattcaaggactaaaaaccattgctggcagtaaagctttattagaagttgaacctgcgcacgatgatgcagaggtggttaaaaacatcttaaaagctgattgcgaaattattggcaagacaaatttgcacgaattggcttttggaattacgggcattaaccatgcttttggtacacctatcaatcctaaatatcctgaacttattccgggcggctcttcaagtggttcagccgcggcagttgcagcaaaacaagctgactttactctaggcaccgacacgggcggctctatccgtatgcccgctgcgtgctgcggagtttttggtttaaaaccgacttttggtcgggtaagtcgcgaaggcgtatacccgccgtcaagttctttggattgcgttggtccttttgcaaattcagtcgagatgattgaaaaagctatgcaaattattgatccaacttttaagccggctgaatgcactcgtacaccaaaacttgcgctgctcaatgtcaaagcagatgaggttgtttggaactgtatttatcaagcacttcaaaaagcgaatttagagaccgttttagaaaaagttgaacattttgaagcagcttatgatgcaggcatgcagattattaactatgaaaactggcaagcttttggtgagttaacccaaacaggcttaattggttctgatgtaaataatcgtttattaaaagcagcccaaaccactttagagcaagtaaaacaagcagaagttgtgaaagcacaactgacagaggaactcgatgctttattagaaaaatatgacgcattggttctgccgacacttccacaaattccaccaaaagtttctgaagctgaaaacacggtcgcttttttgaacctaaccggtttagttcgaccatttaatttatcaggccatccagctatttcagtgccacttgaaaccagtgaaggtttgcctgtgggcttacagatcgtatcaaagcatcaaaaagatgagcaattatgtgcaatagctaaattttgtgttgatgcaatgcaataaattacaaggagttagatgatgaataagttgtctaaaatggagtttgcttctcaagacaaagcagttgacttagatgctttgtgccaagaaattcgtgagcgtgcctgtgcaggtgaatttgataatcaggcctatgtgagccaagacattatcgaaaaacttaaaaaaattggtgtttatcgtgccttagtgcctaaacgttttggtggtgaagaatggtcaccgcggcagttttgtgagttgatcgaaactttatctaaagctgacggttcagtgggttgggtggcaagtttcggtatgagccccgcgtatttaggaagtttgccggaagaaacgcttaaagagttataccaaaacgggccagatgtcgtatttgccggaggtatttttccgccgcagcctgccgaaattaccgatgaaggtgtggtggtgcgcggacgctggaaattctcaagtggttgtatgggcgctgacattgttggcgtgggaatttcaccccttaaaaataatgaaatgcaaggtttaccacgcatggcagtgatgcctgccaacaaagccaaaatcgaaatgacatgggacactgttggcctaaaaggtaccggaagccatgatttggtggttgaagatgtattggtcgaaaagaaatggacctttgtacgtggcgaaccttcaaaactcagcgagccattttttaaatatccatcactgtctttagcgactcaagtattaaccgtggtgggtattggggttgcagctgccgcattagaagaatttgaaaaattagcaccgggtaaagcatctattacgggtggatcagaaattgcaaaccgcccagtgactcaatatgagtttgctcaagctgatgcagagtttcaggcggcaaagtcttggttttatcaaaccatggatattgtgtggaatgagattattgctggtcgtgaagcaactgctgaacaaattagtgatatgcgtttggcatgtacccatgcagcgcgagtttgcgccaaagtcacccgaaaaatgcaaatgcttgcgggtatgacagcgatttataccaacaatccatttagccgttttgtaaatgacaccaacgtggtgacccaacatgcctttatgggtgatgcaactttacaaaatgcaggtttagtcagtttcggattaaagccaaccccaggttatctataagtttaaattttgaaaaaggaatattgagatggaagctaaaaaaccattacgcgtgttgttttgcatgggtattaaccagaacttttttgatgcagaacctgctgaagcaaaagcggtttgggcagcatttggtgaaatgtggaatggcattcatgacctacctggtgtgcatgtttttgggaatcttgatgatgaccaaagcatggtgggtgcaagtacgggctggccttggaccacttatttgcttgcagatgttccggatattgagacagtacatgcagcttgtaacttgtttagaacgaccgtggtgggtgaagggccatacaaactttggaaatattgcaaagttgaagctcgtgttgggcgtgaattgattattcaacgttagggcgaccgcaatgactgacaaagtgaatattgcagaaattatagaacggctagaacggttggaagcacacaatgctatccgtaactgcataaatcgttatatggaaatctgcgacgagctcaatgcaaatacagatctttatgagttgatgaatctttttgatcaagactgtatttgggaaggtattggcgataaatattccaaatcttttggtcgttatgattcttggcagtcgatttatgacatgttcaaacgctatacacaaaaagaatctcactttgtcatgaatgcacactttgtaaattcagaacaaatttatgtaaatcaaaatgatgcaaatgctttatggctgatgttgcaaacctcaacttttcaagatggccgtagtcatctaaatgcagcaaagctcaaggtgaagtttcagaagcaagcagatggaacatggaaaattaaacatttccaaacacagaatattttcagtcgtccggtatcgcattggcacagtgaagccgagttgccggtaccttcccaggaatgacccaggacatatttaaaaggactattgatatgaacagtattatcccaacgcataacattggcattgattacgatgctttagttaaaagtgaccgtgcccatacttctctttataaagatgaacgcatttttgatgaagaaatggaaaaaatcttttatagcacttgggtgtgggttgcgcatgctagcgaaattccagaagccggaagctataaaaccattaatatcggtaaacagcctgttgtagtggtgcgtgaccgtaaaaagaaagtccatgtacttttaaaccgttgccgtcaccgcgcagcaaccgtatgtgaacataaaaaaggaaaaactaacagttttgtatgcccgtaccacggttggagctatgcacttgatggcagtttacgtggtgtgccatctccggaaagttacggcgattgtttagataagtcagaattaccgctggtgagtctacgggtagaagaatataacggcatgatcttcgcttcatttaaagaagacattcaaccgcttgaagagtttcttgggcctgcgaaaaaatggattgacctgtttatgaaacaaggcgcaggttatccaattaaagtgttgggtgaacaccgtttccgtttcccgggtaactggaaaatccagcttgaaaataccaccgatgcatatcacttcccgttggtacataagtcattcttaagttctgtagatgaaaaaaccgaagaactctttaacttcgaaaaccagccgggctttgttgaagacttaggtaatggtcacagtgtcatggtgatgattcctgaactggtcaatttagaagaagacttaatggagcgaccaattcaagagcgtttcgaagacttggctcaagctttgcgtgacgaagggcatgaagagttagaagtacgccgtattgttcgagcagtgggtggttctggctttaacttaaatttatttccgaatattgcatgctcaatggcgttcttccgtgtgttacagccaatttcagttgctgaaacagaaattcatcactcggtgattaccatggacggcggtccacaaattgccaatcaatatcgcttacgtttgcatgaacatttccaaggcccatttggttttggtacgccagatgactctgaagcttgggaacgcgtgcaacacggtgccaatgcgggtaatgatttatggatcatgttgaaccgcggtttaccgggcgaagtcaaaaccgaagatggcttaaaaagtgatgtcagtgctgaaacaggtatgcgtgcagcatatcagcagtggaaaaagatgatgacagcttaaggagagagcaatgaatatgaatctgcaattattaaatgaagtcactgctttcatctgggctgaagcagatatgttagaccacagtgaataccgtgaatggctcaatttatggaatgaaaagggcatttatatcattccgattgacccgaatctcacagactacgaaaacaacttaaattatgcctatgacgataatcatatgcgtaagttacgggtagagcgtcttgaaaatggtgaggcaatttctacggcaccaaaggcgaatacggtacgcagcatttcgcgagtacgagtgattcaagatcaagatgatgaaatcgttttacgctgtgctcaaaatttacgtgaattccgtaaagaaaacctcaagcattacacggcagatattacgtaccatctaacccgtgatgccgatactggctttaagattaaccgtaaaatcatcaacttggttaactcaaccgataccttggctggtattagctacattctttaggagcggtaacatgaaacaggttgttttagtgacaggtgctgcttctggactcggtaatgtgattgctgaatattttgcgagccaaggtcatcaagtgattttgtcagccagtacgcttgaaaaagccgaaaatgctaaggcacaaagtcagtatgcccaaaatatatttcctttaaagctggatatttcggtcgaggcagattttcatgcagcggtgcaatggattgaagagaaattttctaaacttgatgtgttaattaacaatgccaccgtcaccaaagcaacgcctgtattagaaattaccgcagccgattttgattgggtgacccaagttaaccaacgcggcacctttcaggcttgtcaaattattggtcaatacatggccaaaaaaggttatggacgcatcattaatatggcgtctttagcgggacaaaacggcggtactgcaacgggtgcacactacgcggcaaccaaaggggccattgtgacgttaaccaaaatttttgccaaagagtttgcggcaaaaggtgttacggtcaatgcgattgcaccgggaccgatggagtcaccgatcgttcatagtgtggtgccagacgaaaaaatggaacagttcatccagaatattccggttaaagccttaggaagtatgcattttattgctgaaacttgtgggttgcttgcgagtccaaatgcgagttttgtgactggtgcaacatgggatattaacggtggtttattcatgcgctaagccacaagcttaggcatgaaaagggagttaaatcatgactacactttatgatgttgtcgttaaaaatcgccatgtggaaggtggaaatattgcagttatggagtttgaatctgcaacttctgctgcattaccaaaggttgaacccggtgcacatattgatgtgcacttaccgaatggtatggtgcgccaatattcgctttgccaaaatccaaatgacgaaggaaagtttcgccttggaatcttacgtgaccctgaatcacgtggtggctcgatttctgcatttgatgaaattaaagatgggatgcaaattcaggtcagtgagccgaaaaacttattcccacttttaaaagccaagcacagtgtgttgattggcggtggaatcgggattacgccgttaattacgatggcatatcaacttgcacatgaaggtgcatcatttgagcttcactactgtggtgctagccctgaaaaatgtgcttttgttgatgaaattaaaaatggtgtgttagcacaatacacaactttccattttaaatccgaaggtgcaagtcacagagcattttttgaatctgccattaaagatattgatcctgaaagtcatatttatacctgtggtccagtcggtttcatggattgggtgattaatctcgccacaactcacgattttcctgagcagcaaatccacaaagagtatttccaagtcgaaactgacacctcgggagattcatttgaggtggtggctgagcgtagcggaaaaatcattatggtcgaagctggcgaaaccattttgcaggctttggctaaagaaggcatcgagattgagatgtcttgcgagcaaggcgtatgtggaacctgcatgtgcgatgtgattgaaggcgaacctgatcatcgagatgtttattttactgacgaagaaaaggccagcaatgagcaaatattagtgtgctgttcacgctctaaaacaccgagattagttttagatatctaatgctctcgcgatttatatggatgtaagagaaggtttaggagaaagatgatgaatgtattacaacaaatagatgagtttacggtcgatccactacagtttcgacgagcattaggaaattttgcaacaggcgttaccattgtgactgcacaaaatgcacaaggtgagaaagtcggtgtaaccgcaaatagttttaactcggtatcactcgatccaccacttattttgtggagcattgataaaaagtcttcaagcttttccgtgtttgaagaagcgacacattttgcagtcaatattttatcgggtacgcaaattgagctgtctaataggttttcgagacgcaatattgataaatttaccgacaccaattttcaacttggcgcaggacgcgcacctattttagaaaattgttctgcggtgtttgagtgcgaacgttatcaagtgatcgaagggggtgaccactggattattattggtaaagtggttcgtttccatgaccaaggccgaagcccgctggtttaccatcaaggtgcatattcttgtgtcatgccgcatccaagccttcaagttaagcaaactgaacagagcagcgtagaccaaacacattatgggcacttatataataatgtctgctacttaatgagtcgtgcttttaaagcttatcaaaccgactatattcctaagcaaatggcttcgggtttccggacaagtgaatcacgtcttttgctcgttttggccagtggtactgcctcaagtaaagaagatttaccgcgagatattgctatgccaatgcaagaagttgaaaggtcggctgaaattctaaaatttgaaggattattggtcgatcacgataatttgtacgccctgaccgagaaaggcaaacaaacggcgcagtatttatttgatattgccgatagccatcaaaatgaggtgtttaaaaaatattctgatgagcaaaaggatatttttattaccatgctgcgagattttgcgggagtagcataagccccattaagctgataaattgaattgatttatcagcttctttacatctagctgactatcatcaaaacaattccacggataaggaatttttggcacacaatttgtttatcaataaaacatgattgcaaatatgccaagacagtgcaccaccacaagcgcaaaatcttgagcggtggcacatgtatagagaggtaagggatgaaccaatatgtaagtgatgcattactcacatggacgcaccatattaaaaatgtgtgcggcaattttgaaaccgattttgatggaacccgtaatttattcattggtgaggttcagtgctttttattgggcgataccgaaattgcttttattaaaaataatgccaataaaattgtccgaaaagccgatgaaattgatcgagtaaataatcgtttttgttttttgattttgcagtattcgggaaaaatgctgctcgagtataagaatgagactctaagtctgaatgaaggcgatattgtgttggtagacccggtcgaaactatttcgatgtatccgcaaggtttggtgagtcagatttcagtgcacctgtcgcgtgaaaaattacttaaagaaaatattagtaccgaatattttggaaaactgattacgcaaaatatgagtggttttttactcaagaatattttgaaaaatatgtctgctgaaaacatcaaactttggtatgcaacggaagatggtaatgcttttgaagatgcgctgattgctttaatcaaacccacaatcaattataaaaatattaatagcccaaataatctaatggaaaaagccgagcgctatatcatagaaaacttagcaaaaccagatttaacacctaaattaattgcagagcatattggggtatctctacgtcatctctaccgtttgttccttcaagaaaatttatctattaacaaatatatacagctcaaacgcctagaaaaagtcaaggcagatttactcgataaaagaaacaaacaaagctcgattacccaaattgccttgaagtggggtttttgggacggtgctcatttttcaaagatctttaaaaagacctatggtatctctcctaaagaatttagagagggtatgtcagtttaaattttcatctctcaatgtcatttttagacaaattcgacgtcattcttgaacaagctagccctatgtaactgtgttgaaattaaattcattagagcaggttagataagcttaataaccataaaactattaagttggtctaatgaatttcactcacaggaaagtgcattttaactgtctgattcagatagttcagggatagatgaaaaggatgaaaccaatgcgtaaacaacgattattgaatgacatacaaaaaatactggcacttaacttatcaatcgctgcaagcttttggggacttaatactcaagcgtttgcgcatggtggaaaggccgaaatggtctcactttatcaaaacatgagtgagcaaggcgctaaagttgtcaaagacgattttaccaatacttatatgatcaccaaaggttctatggtagttcgggccaaacccaattcagatcaggttttggtgaatggcaagcctttcaaactcagcgtgcctttattaattaaggatggtaagcctgttattggaaaagatttttttaatgaagtcttccagtcggggttagatcaaactttcaaaattgaaaatacctttcacccgctcaatagcttaaattctgacgaaatcaaaaagacctttgatgtgattaatcgctcgaaatacgcctataaaaatatgcgttttgccgagttaaagcttaaagaacctgaaaaagccaaagtatgggattactttattaatcataaagattttaaagaagatcgtattgcctcatttattttattaaagggcaatcaagcgattgaaggtgaagttaatcttaatactcaacaagtcacaaaatggaatgtacttaaagatactcacggtatggtgctgctagataattttgaagctgtacaacgtgtaattgagacaagtaaagaatatcaagatgcgttacgcaaacgtggcattactgatgtgaagaaagtgattgctactccgctaactgttggatattttggcggtaaagatggtctggataaacaactcaatatattaaaagtcgttgcttacctcgatgtaggagatgggaactactgggcacatcctattgagaacctagttgctgtagtcgatttagataaagaaaaaattatcaagattgaagaaggcgcaatcattcctgtgccaatggcaaatcgaccttatatgtcgaataagcccgtagcaagtaagctaaaaccactcaatattattgaacctgagggtaagaactttagtattactggccaaaccatacattggggcaactggtgtttgcatgtggcgttagattctcgtgtcggcttgcagctttcaactgtgacttataaagataagggcgtaaagcgtaaagtcatgtatgaagggaacttgggtggaatggtagttccatacggtgaccctgatattggttggtacttcaaatcttatttggactctggcgaatatgggatgggaacacttacctcatctattcttccgggaacagatgcacccgacaatgcagttttacttgatgccgtgattgcagactataaaggccagccacaagtgattccaaatgccattgctgtgtttgaacgttatgcaggacctgaatataaacatcacgaaatttttggcaatcaggatgccagtgaagcacgccgtgaacttgtcgtgcgctggattagtacagttggaaactacgattacatgtttgactgggtattttcccaaaatggtgtaattggaattaatgcgggtgcaacgggtattgaagctgttaaaggtgttaaagcacgcaccatgcatgacagtactgccaaagaagacaccaaatatggaactttaattgaccataatattgtgggtacaacgcatcagcacatctataacttccgcttagacatggatgtagatggggaaaacaacagctttatgcatatggacccagtggtgaaagccaatgacaaaggcggtgttcgtacaagctcaatgcaaattgatagtaaagtcattacgaatgagcaaaatgcggctgaaaaatttgacccatctacgattcgcttactcacgaatttcaacaaggaaaataaattaggtaatccagtttcttaccaattaattccatttgcaggtggaacacaccctgtggcaaaaggagccaatttttctaaagatgaatggttatttaaacgtttgaactttatggataagcaaatttgggtgactcaatacaatccagatgaacgctatcctgaagggaaatattcaaaccgttcgactcatgacacagggttaggacaattcattggcaacaatgaaaatattgaaaataaagaccttgtggtgtggatgacaacaggcacaacccatgtggcacgtgctgaagaatggccaattatgccgacagaatgggtttataccctaatcaaaccttggaacttctttgacaacaccccgactttaaacttgggtgaagaagagcaaagcacgcagcacgaccatcactaaagaccaacatgacgaggatgggtaacgaataaattacccatatctgagcacggttaggccgttcgcaaaaaggaatttctcaatgaaaaatttattttctcaggttatgagagggactttctttgtctcatttttttcaactgtgcatgctagtgagctagaaattaagccaacatttgaagcaacttttggagcttttagtagtggtaaaagctataacggcgaaaacctacatgatgaaagaatcaattggcaagaaggccatcttaaatatggtgctaaaggacaatacacctttaaaagcaatcagctctatgcaagtttgagtggtattagttcggccacatttggtgatggtgacgcaggccaaaacagtaatggcaaagaacgtaaaacagatgtgaatgaatgggtcattggttttaaagacggtactaataaagatgagttgaagacttatgatttaagtattggccggcaaaatatcatgattggtgatgggttctttattgcgggtgatgcattaaaccttggaaaagcgcctgcggatggcacactagatcggggcggcgcatattatctggcagctcgtcgaagctttgattttacaagtttgcttcaatataaaccgcaagagaatacaacgctaaagctggcttatttaaagtcagacaataaagcacaattttcacctgaactatttgtgactgatctgatgtatcagcttaaagataagggcgttgggtttacctatttaaacgtattagatcttacagatgctgaacacgtttcagggcgcgaagatcttaaaaattatgctttacgtttgaattatcaacctttaccagaactgcaagttaaaactgagtttgtagttcaagataaaaaagatggccaagaaaatgctggctacttagcgctgaactataactttttatcttcaaaatatacgccttcattaggctaccgttttagtcatttttcagaccaatatgaccctatgttttatggaaatacggtcgggttcggtacgtggtttcagggggaggttgccggaaactatgctggtccattcaataaaaatgcagatattcatcaagtctcttacatgatgaatttgaaagaaaattttatgttgggtgctttggcttataagttcaaaacagtaaataagtccttagccaatgtggatggacatgagctggatgtattctcggtttggtcggtcaataaaaaattcaacgttattcctttagtgggactttataaaccaaaacacgatatccatagtggcggtactcaaaactacgatgacaaaaccaatgtctatgcgcagttaattttgcaatacatctattaatagatcctttaaatgaattgagagaaataaaatgagtgaagttcagattttacaaagcgtgcagcaatttatggcacgtcaacatggacattttattgatggaaagttagttgctgccgagcttttagataaagtggatattgttaatccgtcgactgaacaagtggttgctcaaattagtattggtagtcaacaagatgtcgcaagcgccgttaagagtgctgaacatgcttttcaaaatgcttgggctgaaactacgccgtatgaacgtggcgttaaactaaataagttggcagatttaattgaacaacatggtgaagaacttgcacagctcgagacgttgtctacaggaaagcttatcaatatttcccgtcatcttgaagttgcacaatccgttattttcttaagatattttgcgggttgggcaactaaaattaatggtcaaaccattcaaccctctattccttctatgcaaggagaaaaatatacggcctttactttaagacaaccaattggcgtggttgcagggattgtgccttggaatttctcactcatgattggcgtttggaaaatcggttcagctttgacaactggctgtaccattgtgcttaaaccaagtgagtttgccagcttatctttattacgtttagctgaacttgcgattgaggcaggtattccagcgggtgtaattaacgtagttacgggtaagggggagacaggacaatatttaattgagtcgccgctcgttaagaaagtctcgtttacaggttcagtaccaacaggtattgccatcggtaaacttgcaatgagtagtgatttaactcgggtaagtctggagctgggtggtaaaaatgccatagctgttttggccgatgcaaatattgatgagattttaccgactttattgcaagcaacttttgtgcatcaggggcaagtttgtgcatccccagagcgtttttttgtacaccgtacaaaatatgatgaacttgtcgggaaactctcgaaagcactttcgcagtttaaaattggatcggctatggatgaaggaagtatgtttggtccactctctaatcagccacattttcataaagtgaaacattatttagatatggctaaagccaacaatcagattattgctggtggtgaggctttagatcagaccggatattttgtacaaccgactttaatttcctttaaaaatacggatgatcctttattttcagaagaaacttttggtccagtggtcggagtaatgccattcgaaactgatgaagagctcattcaactgatgaatcagtcacgctttggtttaaccgcaagtatttggacaaatgacttatctaaagctttaggtttaattcctaaaattgaagcaggtaccttgtgggtcaatatgcatacattcttagatccatcagttccatttggtggggtaaaagcttcgggaattggcagagagttttcagatgcctttattgaagattacaccgaattaaaatcggtcatgattcggtattaaactaataaagaggtttgtcattttataaataacaaacctcagtcttttaacataaaaattgggctaaaaagttagtagtttaaagtgatgctttgttgagttgattggtcgatttctttttgactcactgcatcatctttacatttataactttcaaataaagagagctgatctgcaaagtgggcatcaggttttccattttgattgataaaaccactttgtcctggggccaaaatcgaacacatggtaacttgatttggatttaagaccactctaaaagtagcacttcctgtatttccataagtactaaggtgttgttcatgtgatggatcagcccaaggaatgcctaccgaatttttgctggaaaaacccatggttgccaccggaattttccagtcgttcgggtcggtagagtgatattgatttgaaagttcagtcagcgcattttctaaagcttttaatacgacttcatctgctgtttgtccttttaagaaatcaacattctgaggaacgcttgcctgttttccttgcagtgcattccagattaatttcgatgcactcgctggctgtgcacttcgtggatcattatttaccggataaagcgtatcggtataacgcttataaatattttctgaaaggtttggtttgagtaccagttcaatcatttgattaagccatgtacgcgtaattgctggtgctgcaccttgataatatttcgcctcgctatcagggcgtaatttaagatcccaactggcaagtaagggagcgacttttttagctaacggtgttgccttaggactttgtgcagctttgaccatataaggaacaaaataacgcgcatttaaatcagaccatgcagccgttttattaatttcccaaatttcttgctgactcagttttgctttactttctaaaggttcaattagttcattcacccgatctacataagaaaagtttgacgaatctgagcgtaaacctgcataggctttgttattccagcttgtgacataacctttttgcggattgtattctttagggttgtgtgagaagtcataaaaaccttgccactccattgaaccatcacctttagctggaagctgaatatgctggttttcagggcgaataggtaaacggcctaaagcagccacaccgatattatctttagtatcggcatagaaccaagtgatagaggccgcgacacgtttggcttgagcaagaaactcatcccaatttgaggctttcgctgcatttgcccatcctaataaggtttcaatttctacaccttcccagctacgtttttgtgcataggccgtatggttattttcatcccatgtacttacaaaaccttgtttactcttataaacatctaaaacatggtcggcttgattcttaacttttatttttacttgcttgtgttcaaatggaatataaacccctttatataaatattcttttgaattacttggatttagggtaagttgataaacatcgttagtatcaagtgaacctaccgtcgaaccccatgcgattttgccattagttccaaataaaattgcaggcaagccaactggagttatacctgtcaaattatagccagcaccatgtaaaccaatagcgtaggtaattgctggtgtataccatccttgctgtgggccattatataaaactgcttggccttcaatagtcttatcaccttttaatacccatgcattactggcggtaggtacaccatctaccacacttttgcctaaagcaatgcgagcttgagctaaataggttttggctgccttgtttgaaatagggctaatgtctttaagtatttgttgttgatgtgctaaaagctgagttttttgtgcagattgaataatagttggggcacttgggtcatctagccaacgtaattgttgatagactttaaggccttcttcttgacctttttctttttgcagttgcgtgagtaaatctaaatttgttacttccgaacttgctgaaaagaagcgatttaaaattaagcccacccaaaccatagcaatatcttctggttgccatgttgatggtttaaaatcatgatctgtgaactctttaggcataagagctggatctgctaaaacctctttaacacgcttattaaaacctgcggcataaccttcaaaaattgctcggtcttctggtgagagtgcagcgagttgttgcttaatattttctgggtcaaaacgactatgtgtcgcaatatcatattgaagatagtcggggccgaggacctcagcaaccgtaccttgtcctgtacgttttgacatttccatctggaataatcgatcagtcgctaccgaatatccatagccgtaaaaaagtccataggtatcatttgcatatacatgtggtgtaccgaatttatcgcgcttaattgtgatctgcttttgtgtcggtgtggggtctaaacttgatgaggaattacaacccgctaaaagcgcacctaaaagtaatgttccatatttaattaaagggcgtgtagggtgaggccgagagttcagcatagatatgttcaatttagatatccttactttcattatgaatagaagtgagcgatttaagaatcttcttagattcacgtcacagatgaacaagccctgttcatgaatttaaaatactgttatttatccatgtaattttccattacatttgaggtatatatttataccttctcgaacaagttatttaattttctattttgagagaataaaaaaggccgttataggcctttttttgaaatgaatgagttttatagaagacgaatttagcccaataaaaaatcttttaagattttattaaaagcttcgggttgctcgacattagaaatatgagaggcatttatttctgcaatttttgcttgtgggatgcgttgctgcataaattgaccatctgcaacggttgttacagggtcttgggttccagcaatcaataatactggaattttgatgtcttttaactgctcacggacatccgctttagccaaagcctcacaacaattggcataacccattgcgctgccagcacttaagtcgttacacaggttgttgacaatagaaggatgactttggataaagggatctgtaaaccatcgcgaagctgctgtggctgcgattggctgtaaaccttgctcacgtactaattttgcacggtcaagccatgcctgctcttgaccaattttagcagcagtatttgccacaatgatatgactaaaacggttagggcagtgaatcgcaagccattgacctgttaaaccacccattgaaataccacaaaaagcagctttgctaatattcagatgatccagtaaacggacaacatcttcacctaattgctctacagtatatggaccgtcaggcgtagatgatgaaccgtgaccacgagtgtcatagcagatcacaaaaaattgatcttttaactcattaaactgtttttgccacatgccatagttggtgcccaaagaattggaaaacaccagagcaggggaagatggctcgccaaaggtttgatagttgatttgtgcatcagcagattgaaaagatggcatttgtttctccttaaagtgcttcaacacgttcaataatcaaagcaatgccttgacccaccccaatacacattgaacacaaggcataacggccgcctgtttgctcaagctggtttaaggctgtagtcacaagacgtgcacccgaggcacccagtggatgacctaatgcaattgctccaccgtttggattgaccttgtcagagttgtctggcaaacctaaatcacgggtcactgccaaagcctgtgcagcaaaggcttcgttaagctcaattacatccatctgctctaaagtcaggttgacttgtttgagtaattttttaatggcgggtgctggagcaaaacccataatgcgtggttctacacccaccgctgttgaagcaatgatcttggcacgtggtttgaggttgtaagcctgaactgcttcatcagaagcaatcagtagagctgctgcgccatcgttgatgcctgaagcattgcccgcagtaactgtgccatctgctttcacaactggtttaagtttgcttaaaccttcaagggtggtcgatgcacgtggatgttcatcggtatcaatcacaacagcatcgcccttacgctgagggatttcaactgccacaatttctttagaaaaaaagcctctggcttgcgcgcttgcggtgcgttgttggctcaccaaggcaaactggtcctgatctgcacgattgacgttaaactgttcagccacgttttcggcagtctggggcatggtgtctacaccatacaattctttaagttttgggttaatgaagcgccaacccatggtggtgtcttcaatcttctggctacggccaaaagcattgtcagacttacccatcacatagggtgcacggctcatgctttccacaccacctgcaatcaccaagttcgcttcacctgctttaatggcacgggcagcaatggcaatggcatcgagtgatgaaccgcataaacggttaatagtggttgccggcacctgataaggtaaacccgcaagcagtgctgacatacggccgacattacggttgtcttcaccggcttggttagcacaaccatagatcacatcatcgacctgttcccaatctaccctagggttacgctgcatgagggctttaatcggcacagcgccaaggtcatcggcacggacaggtgcaagaccaccggcataacggccgaatggagtacggatggcatcgatgatataagcgtttttcattctaacttttgtcctttacttcaggcctttttagccattctccgtaggtatttcacggtggcgacatggatgtcgcctcgttgctcagcacaacagggaggttgtgcctgagtaacaaaggtttttggttactttttaaaaaaagtgacacgaattagctggtggtacctgacttaaacagataagactccgttgtgatgctttataaattttcatatcaacgaataacatcacagctgtaatttattgtgatatccataggtctgttgtataagcgataccttacttttgaaaggtcaaaagtaacaaaaacctttgttgaacagaggaggcttccatgcctccctgtccaacgggcgacatccatgtcgcctgtcacgatagtgaatgctgtgtaataggtgtttgttgtgtaaaccttacccttgagtcgcatcaatcaaagttgcaccggttaaagcctgtaactcatcaaagctaagaccttccactttctcaatcacctttaaaccgtctttggtcacatcaatcacacacaggtcagtgtaaatacggtcaacacagtgtttacccgttaccggataagtgagctcagcgacaatcttcggctcaccttgcttggtgatgtggtctgtagtgataaatactttcttggcaccaactgccaaatccattgcaccacctaccgcaggaatcgcatccggtgcacccgtgtgccagttcgccaagtcaccattggctgccacctgaaatgccccaagcaccgcaatatcaaggtgaccaccacgcatcatggcaaaggagtctccatggtggaaaaagctgccgccttcaagcatggtcacaaactctttacccgcattaatcagttcagggtcttcttcacctgcagctggtggtgggccaaaagccaacaggccattttcagaatgtaggaagacatctttgtcagcaggtaagtagctggcaatcttggtcggtaagccaatgcccaagttcacataggctccatcgggaatatcttgtgccacaagttgcgcaatctggtcacggctgagtttctggtagctcatgttatttctccttattgcttactgtgcgggctgtacttgtacaacgtgctgtacaaaaatacctggggtaatgatgtgttccgggtctaatccacccagttcaaccacttcagaaacctgggcaatggtgacatcagcagccatggccatgatcgggccaaagttacgtgcagatttacggtaaaccagattgccccagcggtcgcccttataggctttaatcagggcaaagtcagccttgatcggatactcaagcacatagtctttaccatcaatatgacgggtttctttgccttcagctaaaagtgttccaaagcctgttggtgtaaacaccgccccaaggcccatacctgctgcctgaatacggcacgccagattgccttgtggtaccagttcaagttcaacctttccggcacggtacagttcatcaaacacataagagtcagactgacgtgggaaagagcaaatcacttttttaattgaaccggctttgagcagtttagccagaccataatccccattaccggcattgttgctcacaatggtcaagtccttaacgccaagttcaatcagaccgtcaatgagttcagcgggttgtcctgcggtaccaaaaccaccaatcagaatggttgcaccatctttaatctgcgataaaacctcgcttagtgaggacttacttttgtcaatcatgtgagaaaccttagagcatgaggtaacgtgatgtattactaccgctaaaaatttattgaaattcttaatggtagtaataaatggagtaaattttgtgagtcaaaagcgaacttttaactcacatacactttcaattaagcactagcgcgacggcgttcaacttcagttgaaggagcagcagcggcttctttaaccagttcaatgttaaatgtgatgtgtttgaaagcgtgatctaaaccacggcgttgaatttcagcaggatctgtgacatctactgctgttgccactaaaccgtcacgagtagcgaaggcaaagtcatcccataagtactcatcaccctcaatgttgaattgagtagtcagcttgcggtaacccggtgcagaaacgaagtagtgaacgtgagatggacggttaccatgacggcctaacttgttaagaagagcctgtgttgtaccttcaggagggcatccataaccaactggcatagtggttaacgctacatatttaccatctgcatcggtgaaaatggtacggcgtaagttaaagtcagattgtgacttatcaaagaatgaatagttacctaaactgttggcatgccatacttcaactttggcattttcaataatattgccatcagtgtcggttaccgtaccttcaataattaaggtatcgattttgccagtctcggttccgtcatccatacgtgcaaagccaactgattcaggtgcgccagcaacataaagtggaccttcgatagtacgaggtgtaccgcctgtaataccagctttggcatctgcttcatctgcacgtaagtcaaggtaatgttcaagacctaagcctgctgccaaaagaccaagttcatttgcttgacctgcatcggtaaaatattccaaacctttccaaacttcagaaggttggatgtctaaatcttcgatggcttgaaataaatccccaagaaggcgcactacaatttgttgaacacgtgcatcaacttcgccttttgcagtgtcgacattcatttgttttacaagcgcatcaatttgttgacggttcatactaaaactccttaagtatgcaatacggttttgggtggcagcgctgcgggcatttggttttgctagcgaataagtgccgccacgttccttgttaccttctgaataatctgcttggtttttaaatggacttcagagatcgcatttaaaaaattctttctatttacgaatcatcatcacgaacagaagatggatgacggttaagtgccatcacttcaatgtccatgtatggatagagaggtaaaccttgtaaaatgttatgcaattcttcattgctctctacatcaaaaatgctgatgttcgagtactgacctgtaattcgccagatatgacgccatttaccttggcgttgtaagtcttgcgaataagctttttcaacggccttaatttcatttgctttgtcggctggcatatcaagtggaatatgcacatccatacgtacatgaaataacatgggaaactccttatcctgttgccttaacgacgtaatttctcaatcttatcttcatcaatttcaatgcctaagcccggagctgtcggcaaatgcaattcaaagttttcgtaacgtagcggctcttttaaaatttcttcggtaagtaataacggaccaaataattcagtgccgaacgctaacgtttcaaaagttgcaaatacatgggccgatgcaatacttcctacagggccttcaagcatagtgccgccatataggtcgataccagccaaaccagcaattttgccaacttcacatgcttcaatcagaccaccagattgttcaatttttacggcaaatacatctgcaccatgattttttgcaatacggtacgcgctgtcagggccagttaaagcctcatcagccataatggctacatcaaaacgtagggtgaggcgagcaagtgcttcggtattttgaattgcacatggctgttcgattaaatcgattccaccatcttggagctgttgaataccatgaatacactcaagttctgaccatgcacggtttacatctacacgtacactaacatcagcacctaatgcttttttaatagcaatcacatggtcaacatcttgctgtaaaggacgtgcaccaattttaagtttgaacgtgttgtggcgctttagctcaatcattttgcgagcttcagcaatatctttttctgtgtcaccagacgcaagcgtccaaagcacaggtaaactattacgcagacgtccacctaaaacttcgcttaatggcacacctaaacgtttggcctgaatatcaagtagggcagtctgaatggcacacttagcaaagcggttaccattaatatttttacgaatcagttttagtgtttgtgcaacatttaaatctttaactgatgtcagtaatggtgcaaagtaggtatcaatattggctttgacactctcaggactttcttcaccatagttcagcccaccaatggtggtggcttcaccccaaccgacaataccatccgtggtcgtaattttaacgagtaccaaagtctgggtacgcatagtagtcacagacaactggtgaggacggatagttggaatatccacaagtatggtttctatggttctatacatgaagtttcaactattacgaacttgtttgtataccatagaagaatgtaatagcctaaaatagatatagaacggtattttaagatactaaaaaggtatattaatggaattaagacatctacgttattttgttaccgttgttgaagaacagagtctgacgaaagctgcagaaaagctttttattgctcagccacctttaacacgccaaatcaaaaaactagaagaagaattagggatcgatttattcgaaaaaggctctcgtccattaaaagtaacggaagcagggctgtttttttaccagcatgcggtacaaattttgacgcacaccgctcaagctgcttcgatggctaaaaaaatgaagctggtcgagaatgttgttaaagttggttatgtgagttcgcttctttatgggcgattaccacaggtcatttatctatttaggcaaaaaaatcctgacattcatgtcgagcttattgaatgtggtacacgagatcaggtggaagcattaaaactcggtaaaattgatttaggttttggtcgattaccaattagtgatccagccattaagcgacttttactcagaaaagaaaaattaaaactcgcaatccataaaaaacacccattaagtgatttccaagagtcaggaatttatttatctcaaattatcaatgagacaattttttcttatccaaccacacctaaaccaaatttttcgaccactattcaagctttatttaccaaattaggtcttgttccggccaagctgactgaagtacgagaaattcatatggcacttggcttggtggcatctggagagggtatttgtattattccggaaagcgcctgcgacattggaatgaagaatctaacttatttaaatatcttagacttagaagcctatagtcccatttctctatctatgcgtaacatggaccaaagttcctatattcctaaaatcttagattgtattgaagagatctatagcgaagaagaagtatccagaaatttgaatttataaatttttaatacgctttaaattgaattatcatgttattttaaaactttaaacctataggtaatatgtaaaaggaattattaaatgagaaaaattttaggtatagcttctctcattatgtctacaggtgttgtacatgctgaacaattaaatgaacaagaacaaatttctccgtatagtgcgaatgtgacttttgcaagtcaatatatttcgcgtggttttcaacaaacttggggtaagcctgcactacaaattggtttcgactatgcaaatccgaatgggctatttgtgggtacttgggcatccaatgtaagttctaactatctccgtgatgcttcagttgaatgggacttttatgcaggttatttaaaaaccatcgataaattctcaattggaatgtctgttttttattattattacccaggtgcaaaaagtacggctgaaacggggagtacaagctataactatggcgaaattgtgcctcaaattggctatggtcctttaagtctcaaatattttattacttataccccagattacgcaggttataactcaaatacgatgggtggaccggaaggtaaacgttcacgaggaacaacttatttagacctcaactttacacagccgatcaatgaaagttggacttttggtgcccactatggctatgaaagaattaaaaacttctcagaagctaattttcaggatatgaaagtcgaacttattaaagatttaggtgatggctggactacagggttagcttataccaaagcatgggacaaagacggatactatagaaattatagtaatggtgaatcagatgcaccaatttcaaatccaattcactcaacctttacagtagctgtaaaaaaggtgttctaatttatacataaaaagcctgatcactttaatttggagtcagcaggctttttctaatacatagagaaaattattttttaattaaatcataagccattttagtatcgtctagctgaaccagtgaagcatgacgagcagagagcggatctttattttcaattgctgtcaaaatagctttatgtcttggtaatgaatgaccttgtaaatttgggcgtagactggtgacttgaatcgattgctgcaaaggtaaaaccagcatttttgacatataagccaataagtcattatgcgttgctttggcaattgctaagtgaaactggatatctggctctataaattcttcaactgttgttgccttttccattccttcataggcttgcttaatacgttcaatatcttcttcatttgctgtacttgccgcaatataggctaactccggttctaaaacgcgtcgtacggtagaaagtgttttaaaaaactcgtgctcaggcgtggtttgaatcaaccagaacagtacatctgggtcgagtaaatgccattcttctttaggtcgaactactgttccgattttgggccttgaatatgttaagcctttcgcatttaaaacacgtatagcttcgcgaaagacagggcggctgactttatattcctcacataaatcaacttcacttgggagtttttcattttctgaaatttctccagaaacaatttttaatcccaattgttgaacgattaatgcatgttggcttttgcttggaataggatttttatagtcagctttactcatatttcactattacgacatgttgaatatcctatggtatagatgaccttgtgttttaacaagatcatctttttcaagaataaatattaatgggaatgacgtggaacttctgagccacggcaaccgaccaagaaatcaaaatcacaaccctcatcggcttgtaaaacatgttctacatagagcttacggtaaccgccaataaaacttggtggagctggtggtgctaaattttcaagacgttgcttaagttcttcatcactcacttctaggtgaagttttccagcataggcatcaagttcgataaagtcaccattttgaactacggccaaaggcccacccgccatagcttcaggggcaacatgtaaaacgaccgtgccatacgcagttccactcatacgtgcgtcggaaatacgaaccatgtcggtaatgcctttggctaaaatctttggtggtaggcccatatttccaacctcggccatgcccggatagcctttagggccggcatttttcatcacaagaatacaagtttcatcgacatctagatctgggtcattaatgcgggctttataatcatcgaagttttcgaatacgactgcacgaccacgatgcttcataagttcgggtgtggcagcagatggtttaagcaccgcacctttaggcgctaaattcccgcgcaaaatacacataccgccatcttgtcgaattggattatctatttttcgaattacttcatcgttataaataggtgattgttggcagttttcccaaatggtttgaccgtttacggttaaagcttgaggatgtggtaagagattggcttcacccatgcgacgaatcacggctggcaagccgccgctataatagaactcttccattaaaaaacgacccgaaggctgtaagtcaacaatggttggcatgccacggccaacacggttccagtcatcgagttgtaaatcaaccccaatgcgtccagcaattgcttttaagtgaatcacggcattggttgaaccaccaatagctgcattgactttaatggcattttcgaaagcttctttggttaagattttggaaagacgtaaatcttcatgaaccatatcaacaatacgcatgccagaaagatgagccaacacataacgtcgagaatctacagctggaatggccgcattgtggggtaaggaagtgcctagggcttcagccatacaggccattgtagaagctgtgcccatggtattacatgtaccagccgagcgcgacataccagattcagcagataaaaattcatttaaatcaattttgcctgctttgagttcttcatgcatttgccaaacgatggtacctgcaccaatgtctttacctttgtgcttaccattcagcatgggaccgccagtcactacaatggcaggaatatcacaacttgcagctcccattaataatgcaggggtggttttgtcacaacctgtcagtaacaccacaccgtcaatagggttaccacgaatcgcttcttcaacatccatactggctaagttacgggtaaacatggcggtaggacgtaaattcgactcaccatttgaaaatacaggaaactcaacagggtagccgcccgcctctaaaattcctttttttacgtgttcggcaatttttcgaaaatgcgcattacatggggtgagttcagaccacgtattacaaatcccaatgataggcttgccttgaaactcatgatctggaattccttggttcttcatccagctgcgatacataaagccatttttatccgttgtaccaaaccaggcagccgaacgaagaacttgtttgttattcatacaaatttccctatatagtattactattagaattaattaaattaaaaatacaccataaattttatttttaaaaggtttgaaatttaaatagtattactatattttaaattgaaaggataatttacgagcaagatgctctataagtaaataataggaaatggagtcgaagatggatttcgaaaaggatgtaatacggacggtcacgtttaagctaatacctgcattagtcatactatatctcgtggcatacattgatcgtgccgctgttggatttgcccatttgcatatgggtgccgatgtaggaattggtgatgctgcctatggtctaggagctggtttattttttattggatattttctttttgaagtcccaagtaatttgcttttagacaaatttggtgctcgtaaatggtttacccgcattttattaacatggggcctcatcaccatggccatggcgcttattcaaggccctaaaagtttttatctcttaaggtttttactcggtgtagcagaggcgggttttttccctggtgttttatacctaattacgcagtggtatccggtgcggcatcgcggaaaaatcatgggaatgtttgtgctttcacaaccaattgccatgatgattgcagggcctttagctggtctattacttggaatggatggcattgcaaatttacacggctggcaatggttgtttgttgcagttggcttgcccgcggttttattggctttacctacctttttgtggctgcccgataacattgataaagtaaaatggttaagcattgaacaaaaacaatggcttaaaaatgaactcgttaaagatgaagccgaatatgaccaaacccgacatgccaatccactacatgctttaaaagacaaacgcgtacttttattagcactttactacttaccggtaactttaagtatttatggtttaaatctctggcttcctaccattattaagcaatttggcggaggtagtgatattcaaattgggttcttatctagcattccctatatttttggaattattggactcctcattattccgcgtagtactgaccgcctaaatgatcgttacggacacttaagttttctgtatgcactaggtgcttgtgcaatgtttttaagtggttggctaaattccccagtcatgcagttggcagctttggctgtagttgcgttctgtctattttcatcgactgccgtgttttggacactaccgggtcgtttcttaacgggtgcaagtgcagcagctggtattgccttaattaactctgttggaaatttaggtggctatgtcggtccatttgggatcggactgttaaaagaatacacgggaaatatggctgctggtttgtatttcttatctatcgtcatgctttttggcttgattctgacttacatcgtctatgccaagctcgaacgtcaaaaaacacaaacagtgaatattcaaaagcctttgtaaggaataaaacatgcaaattattcaatttgaaaatcgtgcaaatcaacgtgctgttgccaaagtagaaggcaacatggcatatccggttaaaaatattcaatcggttcgtgatttagcacttttggcaatccgcaataaagtttcactggaacaacaagttgaggcgttagggtttgagtccgaaacttatgattattcatctttattagcagacttaaaggtattgccgcctttagatcatccagatccaacgcattgtttaatttccggtacaggcttaacccatttaggttctgcatctgcacgcgacaaaatgcatcaacaaaatttaagcgatgacagctcggtgaccgacaccatgcgaatatttcaatggggcctacaaaatggccgtccagcacaaggtcagatcggtgcgcaaccggaatggttttataaaggtgacggttcaattgtggtaagaccgggagctgaattacctttaccaccatttgctgaagacggcggagaagaacctgaaattgcaggcctctatgttattggcgaagacttaaagccttatcgaatcgggtttgcgctgggtaatgagtattctgatcatgtgatggagcgccgtaattatttatatctagcacattcaaaattacgtttttgtagttttggtccggctttacggacgggcgagttaccaaaacatttagtcggaaccagccgtttgcgtcgtgatggacaaatcatttgggaaaaagagtttctgtcaggtgaagacaatatgtgtcatagcttggcaaatctggaatatcaccattttaagtatcaacaattcttaaaagcaggggatgttcacatccattatttcggtacagcgactctatcttttgccgatggtattcaagcgcaagtcaacgatgagtttgaaattgaaatgaaagaatttggacttccgctcataaacaaacttgctcatatgcaacccgaattaccgatcggttcagttattactctctaaggaatataaaaatggtcattggacacaactttattggcggttcacgcagcgcacaaggtacaaccttattaaaaagtattcaagctacgactggtgaagctttgccttatgagtttcaccatgcaaccgagcaagagattaatcaggcctgtgaagcagccagtcaagcctttaagacttaccgccataccacacctgaacagcgtgctgtttttttagaaaatattgcagatgaactcgatgctttgggtaccgattttctagaaattgtctcacaggaaactgctttgccacttgcacgtttacaaggtgaacgtgcccggaccagtgggcaaatgcgcctgtttgctaaagtgctgcgccgtggtgattttttaggtgcccgtattgataccgctttgcctgagcgccagcctttacctcgcccagacctgcgtcagattaaaatcggtgtaggccctgttgcagtctttggggcaagtaactttcctttagcattctcaactgcgggtggtgacactgcttcggcactggcagcaggttgctctgtagtggtgaaagcccatagtggacacatggcgacagcagattttgtagcgcaggcaattgagcgtgccgtagaaaaatcaaatatgcctaaaggcgtatttaacatgatctacggtaatggtgtgggtgaaccactggttaagcatcctttaattcaagctgtgggttttacaggttcattgcgtggtggacgagctttatgtgatatggccgcagcccgtccacaaccgattccggtgtttgctgaaatgagcagtattaacccgatgctgatgttgccagaagccttaaaaaaccgtggtgaaaaaattgcacaggatttggcagattcagtggttttaggctgtggtcagttctgtaccaatccgggtttaatcttgggaattaaatcagctgaatttagtcagctcattaacaacctgaccgacattatgggggctaagcctgcgcagactatgctcaatgccggcaccttaaaaagttacaccgctggtcttgagcacttgacccagcatcaaggcattaagcatttggctggcaatactcaacaaggtaatcaggcgcagccacaactgcttaaagctgatgttgagcttttactggcgggtgaccagcttttacaagaagaaatctttgggccaaccacagtcgtcattgaagttgaagataaagcccaactcattcaggcactacaaagtatgaatgggcaattgactgcgactttaattgccgatgaagctgacttaaccgagtttgcagatgtagttccagttttagaggaaaaagccggtcgattacttataaatggctacccaactggtgttgaggtctgtgatgccatggttcatggtgggccatacccagccacttcagatgcacgaggtacttcagttggaaccttggccattgaccgttacttgcgccctgtgtgttaccagaactatccacagagtctattgccggaagccttaaaagacagcaacccgttgcagattttaagattggtcaatggtgagatgaccagagaagcgatctaagaataaaaagagaccagatgatggtctctttttcatagtcaatttcaaatgtgaaataattttcatatttgaaataatattttatttttaagtgattgattttaatattaaaaatagtggcatgtaatttgctccaataggattagctacaaggagtaaataatgaatgcgaatcatatactgcaattgagcggaatattgcagcagaatctagggctaatccctcatgaaattcagttaaaaaaaatgagtggcggagctatccaagaaaattggctagttcaatctgaagattttgcattagtactgcgtaaaaatgctgaatctagtgtagaggctagttcagatcgggagcaggaatttttacttttagatcggttatatcactttggcattaaagtgccagagccactttatttcgagaagtcacctaactttttaaacagtgatttcttcattatgaaaaaaattgatggtgttacagaaggccataaattagttcgaattacagaagaagaaaaacgtaaaaagattactcaagacattggtaggcaacttgctttaattcatgccattcaatcagatgaagtattagagaaactacttcctaagccagataaagatcaatatttagaaaaaaagcttacagtttttctagaacaactggatcacttaaaaagacaacgtccaatccttgagtacgctattcaatggatgtttaacaatcttccaaaagtcgatgatttggtcttagtccatggtgattaccgcattggtaacatcatgattaatggcgatcaaatttcaggaattttagattgggaatttacgcaatggggagatcgaagagaagacttaggatggtttacctctaaatgttggcgttttggtcaagatgaaaatatagctgggggaataggttcatataaggactttgcgaaagcttacgctgagatttccgatatttatatccctgaatttgaaatgaagttttggcatgtcctgtctcatgttcgatgggcaattattgcgatgcagcagtctgaccgaaacaatgaaatggatactccatcactcgaattagccctaacggaatttttagttccccgccttgaaaaaaatatcttggaaatattgggagaaaaagaatgagcgagcaaaagataattgacctgatcaaagctagccaagccgtcattaaaaatgagcttttaccgcaatcgggcagtcagaaatataacttgttaatgctcatgagaagcttagaaattttgcaggcttatattttgcaaaaagatacctgtacattgcatcgttcaggcattttacaagattatttttcatttccaattaaagatattgatgaggcaactcaattgtttattagcgatatccgtgaaggtaaacaatcggatcaaacttttgagacattaaaagccctgaatttggaagaattaaaaattactgaaccgaaggtggccaatcatggataaatatcggctacgaatttatttggttcgacatgggcatgtttcatactttgatgcagctaataatccgattaatccgaaatttgcacagttatccgaacgaggaatagagcaaatacaacaactggctcatcaattacaagttgttaattttgaaaaaatttactcatctaccatgcctcgttcgattcagacagccgaaattttgaagcgctatcaaaatgagtataaagacattcagtcattcgatgatattcgagaaataagagcaggacgtttaagagaaatttcgttggatcgcgctgagctggaaatcaaaaaggcctatcagttccataaaaataaccttgaattatttgtacaaggcgaaagttggactcactttattagtcgtgtactgacttggtttgaaggcatgatattaacggcaaacaaagaccagaatatcctcatttcttcacacgatattgtaaatcgaatactcattaattgggtttatggacatgacttcaaagatgtttattcgcaggaacaagattatggctgcttaaacattcttgatctgacgattgaaaatcaaaaggtaataagcaaacgaatcaagcttcaaaatttcacgccgtacaatctgattaaaaatgagctatttaatagcgctatggatgatgtgtatgaaacttatatcgcgactcaaggctttaaattaaaggagctcagctcatgatcacactatctaatgaattattagagctacaacagaaagttagagaatttattcagcaagaggtgattccattagaaagtgatcctcgccaagatagccatggccctagtgaagctttacgccaagaattggtgagtcgggcgtgtagttgggggctgctaactcctcatgcaagtcgagaaatgggaggacttggttggtcgcatctgcaaaaggctgtagctttcgaagaagcaggatactctgctttaggcccaatcgcgttaaatattcatgcgccagatgaaggaaatatccatcttttagatgttgtggcaaatgatgcacaaaaagaaagatggttaaaaaaactggtagctggagaaattagatcttgctttaccatgacagaacctgcaccaggtgctggctcggatccatccatgcttcaaacaacggcaattgcagatggcgatgactatattattaatggccgtaaatggttaattacaggagccgatggagcgagcgttgcgattattatggcaaaaatggaagatggctctgcttcaatgtttctaacagatacaaacgttgaaggctttatattagaaaaaaatatgaatgctatggactcatgcttttcaggcgggcacggtattttacgctttgagaatttacgtatacctaaagaaaacgttttgggtgaaattggtaaaggatttaaatatgctcaagttcgccttgcaccagcacgtttaacacattgtatgagatggctgggacaagcaaggagagcacatgatatcgctactcaatatgcacgagaacgccaatcttttggtaagagattaggagaccaccaaggcgttggttttatgcttgccgacaatgaaatggatattttaacaactcgattagccgttcactattgtgcgcaggttttagatttgggtgagaaaggaaattacgagtcgagcctagttaaagtgatcagctctgagggtatctggcgtgtggtggaccgatcagttcagattttaggtggacaggccatgacggatgaatcagtggtctgcaagatttttaaagatgcgcgaggttttagaatttatgatggcgcaaatgaagttcaccgcatgagcatagccaaaaaactattagggaaacaggcataataaaacagggataagagaatgaatatttttgatgtaaaagataaatatattttaattactggtgcttcaagcggtctagggcatcacatagctgaattatttgcaaaagaaggtgccaatatcgttatttgtgccagacggttagagcgattgaaagaattagaatcgcatataaaaaatgaatatggcgtacaagtttatacctttgcattagatgtaaatgatcgttccgctgtgaaagatatgcttagttctttagaagctgaaggagtcactatagatgtgttaattaataatgccggggtgagtgataccaagcgtttcttagactataacgatgaagattgggataagattgtagatactaaccttaaagccccttggcaatgtgcacaagaagttgtgcagcatatgattaaagctgaacgaaaaggatcgatcatcaacattacatcaattctgtctcagtctaccaacctaggtgttagtccatactgcgcatcaaaggctggattacgccatttaacagaagttatggcagtagagttggctagatttggtataaatgtaaatgccatcgctccaggttatatgattactgaaattaatgaagaatatttaacgagtgaggtaggccaacagcttttaaagaaaattcctacaaggaagtttgtagagtttgatgacttaaatgggccattactgttacttgcttcgcaagcgggacaaggcataacaggtatcgaaattaaagtcgatggcggtcatagcgctgcgcctatataaaacgttttttaatggagtaaaaaatgctgaatcgaaaaccaattaatattttggtcacctatattaaaaaacctaatattaatggttttcgttctttggttgagcaggcgattagtgaagtagagtcgaacgaaattgatttggtggaatgccatatttcagatgtacaagatgttgctcaaagcttagtagaaaatggctgtcagattcttctatgtacgggagcgaccgcgagttttctacagaagaaattaaacattgatatacaggtcattcgaactggtacttttgatgtcattcaagccatatcaaacttaaaacaatataagcgaattgctttggtgggtaatacgtccacagtcgatcttgagaactactctgatatttttgctttagatatacaacagtttaactatgactcatatttagatgctaaaaaaacaattcatttaattaaaaatcaaggctttgatgccattattggttcgcctgttgcagtagaattagctctgaatgaaaacctagtcggacatttggcgattagtgtgccgtctttaaaagaccttctgcaaaatgccttacgtacccttgaaaagattcgtagagaacagtattcaaccttacgtttaaccgagatctttaatcacttaaatgaaggcatttgttttattacaaagcaaaaaaagatttctttaattaataattcaatgagttcgttacttgaaaaagactcttcagacgttttaaacaaatcagcactcgaaatttttgaaggtttaaactttgatatcgatcaagaaaatagtcatcaactcgtccaatttaaaaatttaaaacttgctgtatatatttccaaattaaaaaatgactacatagatggctatatcttaagagtgcaggaactaaatgcattagagcagtctaatagtcagtttagaaaggtttcatcaaagaattttaatacaagatatacctttgaccagatcttgacgcaaaatccaaattttcaacaaatcattaagttatccaaagcatatgcaaaaaccgatagtaccattctcattactggtgaaagtggtacaggtaaagaagttttagcacaaagtattcataattatagcagtcgttataaagcgccgtttgttgcaatcaactgtgcatcttttccggaaagcttgttagagagcgaattatttggttatgaagaaggtgcctttactggggcgaagaaaaatggacgtattggtctcattgaagcagcacatacgggtacgctttttttagatgaaattggagatatgccattacatctacaaactagatttttacgggtcttacaagaaagacaaattaaccgcttgggctcagtggtaagtcatcatttagatatacgtgtgattgctgcaactcatgcggacttagaagaattggtacgaaatggaagctttcgggcagatctctactatcgtttaaatattttaagagtgtatacgccgtctttaaaagaacgaaaagaagatatcttgtatttagcaaattcctttctagagaaatatagaaaaacactgaatgatttgccgagtattttacagaaggcttttttacactattcttggccgggtaatatccgcgaacttgaaaatatcgttgaaagaatcaatgtgctattacagcttgatcatgaaattttaactccagaatttttaaagcaacagttacccgagctatttcaatctcaaaatcaccacacgacgcaacctttattaaaagaagtaaaagttaatcaagagttgagtttaattgagcaaacacttgcagaagtagagggtgatttagaccttgctgcacaaaaactcgggattagccggaccactttgtggcgtagaatgaaactcataaatcattaatttcaaaattgaaatcttttcaaaaaagaaaaataaaataattaattaagttattgaaaataataataaaaatatttggcatcatagttgcattgactcatgtaagcatctgaatcagttgctaaattgtgtgaggaaataagaatgacgaatggattaatgatgcattgtaatttaaacattacttcaataatgcagcatgctttgatagtttacgcagatcaagaaattgtaactttgaaagcagatgggataagtaaacaccgatatacatataaagatgctttcgaacgtgtagctcagtttgccaacgcactagaccgattaaatataagttctgatgctaaagtcggaacgatggcatggaactcatttcagcattttgaattgcactatgccattccatgtacgggaagaatttaccatacaattaaccctaaattggcgcctgaacagctcattcaaattatcaattctgctcaagatgaggtactcattattgaaccagattgtttggcattagttgattcgatttatgacaatataaagccagtcataaaacattttattgtgctcggggaccccaataaaaatttaaaagcacaatttgatttcgtcttttatgaagaactcattgctccagagcagtcttattatgattggccagatatccctgaagagcgtgcaagtggtctttgttatacatcaggtacaacaggggatcctaaaggcgttctttactcacatcgtagtactgtattacatgcattaatactaagcatgccaaatgcgattggcttaacgcatgatagctgtatcatgcctttggttccgctttatcatattagcgcatggggaatgccatttaatgcggttttgtcgggggcaaaaatcgtttggcctcattcatttgcgggccaaacagataagattttcgacctgatccaatcagaacacgtagatatttctatggctgttcctaccatctggaattcttttaaaaattatcttgaagaacaccatatttcatcagtcagtttaaaacgtgcaatatctggtggttcagctgcgccatattcgcttattgagtctttgagccattatggaatttctgttgaaaatgcttggggaatgactgaaaccagttcaatggcagcgtgtaaccgagtagaccaaattaaaaataatatcgaaacccaatcgattaaatgcggtaaacctatcttcggtattcaaatgagattgcgtgatgagaatcatcaattacttcctcatgatggtgtgcatgaaggcattttagaagtacgtggtcatacaattgctaaacaatatatcaatcaaccaaaagcaggagaagaagagggcaaatggttcgatacgggagatatcgcctgcatagatgaatatggatatatgcatattacggaccgtgccaaagatatgattaagtcgggaggagagtgggtcagcagtgttgaagttgaaaatgcagcgatgggatatgaaaaagttgcagaagccgccgttattgctgccaatcatcctaaatggggagaacgcccacttttaatattggtgccaaagtctccacaagaaaaaattgaacattcagaaattgtcatttttctatcatccaaattacataaatgggccattccgtcagcaaccatattggttgaagaaataccgcatacgcccactggaaaaatcagtaaaaaaatattgagagaacgttatcacgactatttcaccaatagtgcttttgctgaatgtaaataatgatcaacataaaaaaggattttttatatgaacatccctcaggaagcaaatatcgttttagatgcgaaatttaaaaagatggtaaagcagagaaatcgattcgccgttttcttaagcttaattgtactcagcatttactttatttttataggaacagccacatttcatcccgaattacttgcaattccattagaagcaagcaaagtcaccattggtttaccaattgctgcaattgttattgtattgagctggattataacgggattttatatatttattacgaatcaatactttgacaaacaaaaagaaaaattaagaaaggaatatcgttatgaataaatattttgcttttactattttgaccttatttagctccggtgcttgggcttcacaaagcgagccaaggaattggaccgcaattattatgtttgcatgtgtagttggtatttcactacttattacttttaaagctgcaaagaaaacagtatcgaaagaagatttttatacagcgggtaatgctatttcagctaagcaaaatggtttggcgattgcgggagactatatgtctgcctcaaccttactcggtatttctagtatggttttcttcaaaggctatgatggttttatctatgtgacaggcttttttgtttgttggcccattttaactttcttaatggctgaaagactaagaaaccttggcaaatatacttttgcagatattgtttcgtatcgattagatccacagcgcacccgtattttggcaacgtgtggttcacttattgttgtgtgttgctatttaattttgcaaatggtgggtgcaggtcagctgattaaattattgtttggtctagattataaaattgccgttatgctggtcggttgtctaatgctggtgtatgtcattttcggaggaatgcttgcaaccacatggatacaaatagttaaagctattcttttgctctttggcggaaccgttttagtctttctggcatataaagcgtttggttttagtttaaataatatggctgaggctgccgttaatacacataaattaggacaaaaggtgttagaaccgggtccaatgttatccaacccgattaatacactctctatgtctattgggttgatctttggtttagcaggtttaccacatattctgatgcgcttttttacggttccaaatgctgctgaagcacgccgttcagtcttttatgcttctggttatattggttacttctttattgtagtttgtattttaggtttagcttccatcgccatagtaggcacgaatcctcaatattttgtagatgggcacctcggtggagatttaattggcggcagtaacatggttgcgatgcatctagcaaaagcccttggtggaaatctattactcggctttttatctgctgtagcatttgcaacgattttagctgtggtggctggcttggtacttgctggagcttctgcgatttcccatgatttatttcaaaaagtcattaagaaaggcaaggcaactgaaaagcaggaaatggttgtatctcgactttctgtggtggttctaggtgtgattgccatagcatgtggaatcttatttgaaaaaatgaacatcgcttttttaatgggacttacatttggtattgctgcttccgctaactttcctgtacttattctttctatgtactggaaagatttaactacccgcggcgccatatttggtgggtttgtaggaatcatttccgcaattacctttgtagttttatcacctacggtctgggtaggtgttttagggcatgaaaaagcaatattcccatttgataatccagcattattttcaatgcccctcgcttttttagtgagtattgttgtgtctttgactgataaaagtgaaagagccaagttagataaacagggttttgaattacaagtggtgcgttcagagcttggggctcaacaagggtcgtttgaaaaaatgcctttgcattaagtctattaaataatcccaaaagtaagatagctggagtggattatgagagtaaaggaaagagagatgactccctatataagttaataataatttggacttattaagtaaaaaagaccagtattaactggtcttttttactttcagtttttattttttgacgattaaagctaacttaccaacatgttgtccttgatcaaggaattcatgagcttggcgagcttcttcaagatcaaatgttttatataacaagggttttatctgtccttttgaaattaaaggccataccttttcttgcagtgctgccatcacttctgctttcgcttctgcagtttgagagcgtagggtagcgcctgtatgagttaggcgtttagcaagcatcggaaaaatattgactttgtccgctaagcctttaagcacacctatttgcaatattgtgccgttcattgcagcgacttcataatttcgctggatgtaatctccagcaataatatccaagacaaaatctacacctttaccatcagtatgtttttttacaacttcaacaaagtcatcttcattataatttatggctacatcagcaccaatttttaaactcgcttcttgatgttctttgctcgaaactgttgtaaaaattttggttgctccaaaagctcgagttaacatcgttgcggtagtaccaattcctgaagtaccgccatgtattaaaattgaactgtttggacggaattttgcatgttggaaaagatgtgaccaaactgtcataaaagtttctaataaaattccaccttcaattaatgtcagaccttcaggaatgaagagtacattatcttgatgggcaactacatattcagcatagccaccgcccggaactaatgcacagacttcatctccagctttaaacttagtaacttgcttgcctacttgtttaacaattccggaaacttcaaggccaggaatgtcagttacaccaggcggtggtgcatacaaaccttttcgttgcattacatctggaccgttaatacctgctgcaacaacttcaattaatatcccatcatctgttaactcaggcataggtctttcactaaccgtaataacttcagggccgccagcacctttaaaagtgatacatttcataaagttgtttccttattagatattgttaattaaataagcggaattgagactgagtgcgcaatcccgcttaggatgaaaaataattaagatttagcttttttcttacccaaggtaatggcaagtgctaactccatgaattttccaaaaggagcatgtaagaagcttgggaaattccagcggccctgatcaaagacaccttttgcatggctcatagaacggaaaccttcaattccgtgataagcacccatcccacttggaccgataccaccaaacggtagatcgtcttgtgccacatgaattaaggtattgttaataccaacgttacctgaagtcgtacgtcgtagcagttttttgcaatctgcatctttttcaccaaaataatataaggcgagtggacgatctcgttcattgatgtagttaattacctcatcaatatcacggtaggtacgcacgggtagaattgggccaaagatttcttctttcataattgcatcatcatcttttgctcctacaacaagtgttggaacaagagtacgagtgcgattctttgccgattcagatttgactcctagttcaatgattcgtgcgccattttgtcttgcactatcaagtaagccttgtaaacgagcataatgacgttcattgacaattgaagtgtaatcatcacagtctggcccgtttggatagaatcgagagactgtcgcgttgtattcttcaataaatatttctaaatcatcttcatgaacaagggcataatctggagcaacacatgtttgtccaccattggataattttccataggcaatactagtcatggttctcgagtttacgtgccctcgacctacaatcgctggacttttaccacctaattcaagagtgagcggaacgaggttatcacttgctgctttcatgactttacagcccacaggtgtacttcctgtaaacaatagatggtcgaaaggtagtgcactaaattcagcaccaacttcaggcccacctaaaataaccgcaacttcttctatagaaaagttcgccgcaagcatgcgtgaaatcacttcacttgttcgaggggtgagttctgagggtttaagcattgctcggttaccggcagcaatcgctgtagcaaaaggaataagcgtaagagaaatagggtagttccaaggagccatgaccccaataacccctttcggctgatattctatgtgagcactagctgagcgatagaataagctgacatgacgcttttctggcttcatgaaacggcgtaaattacgcgttaaataatcgatggactgaacaataccaacaagttccatgacatctgtttcatgatatgaacggtgtccaaagtcttcacttgcagcaacttgtaattcactacgatattcaatgacagcagcacgaagttttgcaagacttgctttacgctgttgaagtgttggtggttcagctttcaaaaatgctttgcgttgtcgagagagtatctctgatgcatttaaagtgctgcttacttcattgagagtattcatcttaaacctcaaaacatagcttaacgatcctaagctaactgactgatgattaaagtttagtcggtagatttaatacgacctgagcatcttcaatcacatcgagacgaagaatagtagatgcgcccaactggtctagaagctggctcacatggccgccatggcgtgtcacttttaccttgcgcgggaaaagtttttcaccaaacgagagaacattggtttgcactagagtttgatgccactcgttatcgactaaatgcaacatcgtggctttacccatgcgggattcagacttaactctttttaatgacggagttgcggttgttaggctaatatctaatttgttgtaagttgaaagtgttgcttcaacttttttcttatcaatctttacatcaatttcggctagccattttggaagttgataaccatatacgccacgtacacgtgctatttcagtgtcgacaggtaaagctaatacatgcgcataaaagtgatgtttacgaatcgagttaatcagctctaaagcatgcggaccatgagctttaggtttacgcacgacaatagctacagacgcttcattgtatggatcattatcacaaactgtataagtgaaaaaggtgagtgcaactagtccataacctggaaaagcttccaagggtactagaggcgaaggtaattttttctttaacagcttaacgggtgcaagcatcaaaacttgcacattgccgctacgataataaaagttgggagcccagacaggtccaactcttgattcaactaactttttaggaatgctacggaaaaaatcaatatttccagctgcaggatcttttgcaacttcatctaaatcaggattcattctaaagcggtcataataaccaccttttggaactttaactttctgttgaccaaattcaacttcagtgaacgctttatttgtattcataattggttaacctttaaattgatcgactgagtagctgataatctttaaaagcagatatcaactttctgcctgtaggattactataagtttaaagttcacttgaatgtcaatatgctatttctctaagaattaaaactgcttgtaacgaatttagaataacttttaataagaataggtagagttgattagcttttagatgatctaaagaaaacccttagtttttaggactgtagaaattatttttttacactttttaaacgctgttttctctaaaatctattgaccttaaagtgaactttaaccttactatgttatgactatccatgagggtaggattgaaaattttatatgtacttattacgaattaattagagcatatacagtaaatcgatagtgtaacttttacacaggagaaacaaaaatgggatatgtcacaacaaaagacggcgtagatattttttataaagattggggccctcgcgatgctcctgtaattttcttccaccatggttggccgctcagttcagatgactgggatgcgcaaatgctttttttcttaaagaaggttttcgtgtagttgctcatgaccgccgtggtcatggtcgttccactcaagtctgggatggtcatgatatggaccattatgcagatgacgttgctgttgtggttgagcatttaggtgtacaaggtgcggtacatgtagggcattcaacaggtggtggtgaagtagcacattatgttgctcgttatcctaatgaccctgttgctaaagctgttttaattagtgccgttccaccattaatggtgaaaactgaaagtaatccggatggtttaccaaaagaagtttttgatgaccttcaaaatcaactttttaaaaatcgttctcaattttatcatgacgtacctgcaggtccattttatggatataaccgaccaggagcaaaagtatcagaacctgtggtgttaaattggtggcgtcagggcatgatgggcggagcaaaagctcattacgatggaattgttgctttctctcaaacagattttactgaagacctcaaaaagattgaaattcctgttcttatcttgcatggtgaagatgatcaggttgtaccttttgaaatttcaggtaaaaaatctgcggaactcgttaaaaacggtactttaattagttatccaggatttcctcacggaatgccaactacagaagcagaaacaattaacaaagatcttttagcatttattagaagttaagtttaaaaaagagggcagccaaaattgactgccctttttattgattcgattgattatttttttcgggtgcatattaatgaatgacgatactaaaaaatgtcctttttcccaacttactactgattttggggctccagttgtagataaccagaatagtatgacggcaggtgcaagagggcctctacttgctcaagatttatggttaaacgagaaattagctaactttgttcgtgaagtaattccagaacgtcgtatgcatgcaaaaggttcaggtgcattcggcactttcacggtgactcatgatattactcaatatacccgcgctaaaatctttagtgaaattggtaaaaaaacagaaatgtttgcccgatttaccactgtagctggtgaacgtggagcagcagatgctgaacgtgatattcgcggctttgctttaaaattttatacagaagaaggtaactgggacatggtggggaacaatacaccagtgttcttcttacgtgatccacgtaaatttccagatttaaataaagcagtaaaacgcgatcctaaaactaacttgcgtagcgcaacgaataactgggatttctggactttattacctgaagctttacatcaggtcactattgtcatgtctgatcgaggtattcctgcttcctaccgtcatatgcacggttttagtagccatacctatagtttcatcaatagtgcgaatgaacgtttctgggtgaaatttcatttccggacccaacagggaattaaaaatttaacagatgccgaagctggtgaattagtggggcatgatcgtgaaagtcatcaacgtgatttattcgatgcgattgaacgaaaagatttccctaagtggactttgtatgtacaggtaatgcctgagcaagatgctgaaaaggttccatatcatccatttgatttaacaaaagtctggcctcatggagattatccattaatcgaagtgggtgagttcgagctgaatcgaaaccctgaaaatttcttcttagatgttgaacaatccgcttttgcaccaagtaatctggttcctggcattagcgcttccccagaccgcatgctgcaagcccgtttatttaactatgcagatgctcagcgttatcgtttaggtgtgaattatcagcaaatacctgtaaatgcggcacgttgcccagttcatagtaatcaccgtgacggtcaaggacgcatcgatgccaattatggtggtcttccacattatgagccaaatagttttggacaatggcaagagcagcctcagtacaaagaaccaccgttaaaaattaatggggatgctgatttctggaattatcgtgaagatgacaacgattatttcagtcaacctcgtgctttgtttgaacttatgactcctgagcaacaacaggctttatttgataatactgcacgcgcaatgggtgatgctcttgatttcattaaatatcgccacattcgtaactgttacgcatgtcatccagcttatggcgaaggtgtggctaaggcgcttggtttgacagttgaaaatgctcaagcagctagagaaactgaccctgcacgtggtttaccaagttttatttaaatctttaaaaacagaacataaggctatgtcaataatagctttatgtacttaactattttatagcatcgaatgaaaaaattaatatctacactcagtctcggtattccatcattattcttcacaagtaatgtacaagcagggctgaccattcctgtgggttttaccaaatcagattcatttatatttaacgcctcaagcaaagactgcttataaagaggctttagctttacctgaaacagccatacctttattagatttagattttggtatattaactcaaaattcatcttcaaagattcggtttaactaatattatttaaaagagaatagaactttattgttttcagatagtatatttaaattaactagaattttataaataaaatgaaatataaaaaatattattatatatggtagaaataatcgtagccctttcttcttataataagtagaaagggctctttaaaattattttttagctgtcgatttatcaagtgatggatatggaacaggcatatttaatgccaattgtgcatctttcactacatcaaaacgtagaactttattagctcctagttcatcaagtaatttactcagcggtccaccactttttacaacttgaacgttctttggaaaaagcttttgtccaaatgccaaagtattagactctacagaagtgctgtgccatttcccatctaccaattgatacatggtttttgtttcaatacgagattgtggtttcacagttttaatttctggcaatggcgcagctacacttaaatcaggtttaccatcagtattataaatatgagcttgaactgatttatcgccaattttcatatcaataggtgttaaccattttggtaattggtaaccatacacaccacgaacacgagcaatttctgtatttactggtaatgcgagtacatggccataatatttatggttacgcattgaactcaataattctgtggtattgaagtgatgagcaccaggttggcgtacaaccacagcaaccgaaacttcatcatatgggtcgacatcaccgactgcataagagaagaatgttaatgaaaccaaaccatagcctgggataggttgtaatggttcaagtggagcagggagttttgcttttattttagaaatcggagcaagcatcaagagttggatattgctagtacggtaataaaaattcggagaccatactttacccactctagtatctacaagtttttttgggatggtacggaaataatcaatatttccagctgcaggatcttttgcaacttcgtctagattcgggttcatacgaaaacgatcgtaatagccgccttttggaacattaactttataaggcccaaactctacaacagttgtttcctgtgaagtgcttgagtttgatggttgttgtacagaacttgagttagtctcaaccgcttgagctgaaaaactcaataataaacttacggataaagcagtaactgttcgagggagattaagcttgttgaacattgaaatgttcctcctatagaccatgtattaatgctaagattaaagtgaggttgaaggtcaagcttttttattagtattttaaactttatttaaaaagaaaattagaatataaaaaataaaagatatgattttttatgaattaaaaaagagaaccagaatataaaattctggttctctttttttaaaatattttaataaattaattaagagtgcttaaccgtttaacaacagcttcggcaatttctttactagattgagggttttgtccagtaataattctatcatctgatactacatatgaagtaaatggaagaaagccttgtttatatttagcgccatggttaattaagctattttgtaaggaaaatggaacttgagatttaattccagacaaagtttcttctttattagcgaacccagtaacagttctacctgaaatgagtggtttaccattttcacctaccaaaggtaataagcctcccacgccatgacaaaccgctgaaacgataccaccttggcggtaaatagtttcactaatattttttagttccttattatccgggaaatcccacattgttccatgtccacccgtataataaattgctttatagcgtgttggatcgatactacttggtgccaaagtgtggtttaagcgatacataaactgacgatctgctaaaagttttcgagctgatttatcaacgtaaataggcttcatactacgttcatcaagtggtacaactccaccttgaggactgacaaaatccatgtcatagccagcagctttagcgacatcataaaaatgagttaattcagtaagccataagccagttttatctgaacgagtcggataggctgaatgattggtcataacgactaaaattttacctttgcttttagccatttcttgattttgtacttggtcagatgcatttgcatagcttactgataaaaaagccataaaaaaggcaatcaaccaacgctgaaaactccaaactttagacacggtaagctcctcatatttacctattaggaatgctaagattaaagttaggtttaaggtcaagtttttttaaaaaatgaccgatgaatggaaaaatgattagtcagagattaggaagttaatgattcaggtaaattataaagaaagcatgatgacatgctttctttataagatttacattaattagcaccgcactaaattattatttcaaatgcttttgaagttcagatccagcttgtgataacgcagttttcacagatggttcgttgcttaatggatttaaaagaccatagtcatgaatcaaaccgttataacgagttacagtcactggaacacccgctttatctaagttacggccaaaagcttcaccttcatcacgtaatacatctaattcagctgtttgaattaatgtaggtgggaagtcttttaactgttcgcttgtagcacgaagtggtgatgccaaaatattgttgcgatcattggcattggttgtgtagttgtcccagaaccatttcatcatgttcttagtcaagaagtatcctttttcatactgattgtaagaagcattgtcgaaaccagcattggtaacaggccataacattacgttgtaacgcacttttggaccgccagattgtttaatctgaagagcaacagcagccaccatgttgccgccaacgctattacctactaaagctagacggctaccatcaacaccaatttctttaccatgtttagcgacccatttggttgcttcatatgactgattaattgctacagggaaatgagcttctggggaaggcgtatagttaacatatacagccgctgcaccagactcgcgaactaaatcacgaattaagcgttcatgagtagcaaagtcgcctaacacccaaccgccaccatggaagaacataaatacaggaagaacgcctttagcattttctggtttaacaatttttagttgaatgctttgaccatttatttgaattgttttctctgaaacttgtgctggcggaagttttgctcctttttgtgcaccgattaaaacttgacgagcttcgtttggagtcattaattccattggtttaccgttacccgaattgagtacgtctaggaatgcttgtacacccacagtcggagtaggagtattgatagcttcagctgaaacagctgtagtgaaaagagcagatgttaataaagctgttgcgattttcatggtgaaaactcactttaagttaaaaatttgaaatacaactttgagccaaggcttttcgtccaagatcaagctggttctatcgaaagctcagttcaataagtatcttgtgtatataatacttgcacgcaagatacttatggtcaagaattatttataataatttttagataattttattttttggtttaaatatgaaagaaaacaagatattaggtgataaactctgtttttcgctttattcagtagcgaatgcacttacgcggcagtatcgtccattacttaaagatttcgatttaacttaccctcagttcatcgttcttttagctctttacgaagaagatgatatttccctaaaagaactcagtgaaaagaccttatttgactcaggcaccttaacgccgttggttcaaaaacttgaagcaaaagagtttttgaagagggtatcaatcaaagaagatgagcgggtaaaaaaagtaatattgacggacaaagctttagagataaaagaaaaagtgattgatctacccaatcagttgcgatgttcaatgcatatgaatgatgaggagctgactatgctgagaaagctttctttgaaattattggaagatttataaagttttctttaactgaaaataatttttatctgcaaatagtttaaagctttaaactttaaaaaaagaggcatctgaaggcctcttttttacataaaaaattaatgaatacaactctttaaataggggaataataaaaggtattgacattaaagttagctttaatcttaaagtaaagccatactgaatgaggtcattccaatgaaagtgttcgaaaaattagtattcccaaatggctcatatgttcctaaccgtattgctaaagcagcaatggaagaaaacatggctgatttaaaccatgcaccatcagaagaattaatgcgtttatatcaggcttgggcaaatggtggcgtaggtctaatcattaccggaaatgtaatggtagaccgccgagcaatgactggaccgggcggcgtagtgcttgaagatgaaaagcatctagatacttttaaaaaatgggcacaaattgggcgctcaaaaggtgctcagatgtggcttcaaattaaccatccgggtcgccaaatgcaagccaatcttggtcagcagacgtgggcaccatccgctatttcacttgatcttggcaaaatgtcaaatcgcttcaacacgccaatcgaaatgactgaatctatgattgcagaagtgattcagcgttttgcaaacacggcgcgtttaggtgaaaaagcagggtttaccggtgtggaaattcatgcagcacatggttatttattaagtcagtttctttctccactgagtaataaacgccaagatcaatggggtggttctttagaaaaccgcgctcgcattttaattgagattgttgaagctgttcgtaaagtggtttcgcctcagtttactgttgcagtaaaactgaactcagccgatttccaacgtggtgggtttagcgctgaagatgctcaacaagtggttaaaatgttaaatgagcatgcagtcgatttggttgaactttcaggcggtagctatgaagcacctgcaatgcaaggtcaagcacgtgatggccgtacacttgctcgtgaagcttactttttagaatttgcgcaagagattcgtaaagttgccaaaatgcctgttatggtgacaggtgggatacgccgtaaacaagtggcagagaaagtgattgaaagtggtgtagatatggtcggtattgccacagctctagcaattgaacctaatttgccaaatgcttggaaacaaggccagaatcttactcctgagttaaaaccaattacttggaagaacaaaacacttgcttcacttgccaatatggctatggtcaaattccagttacgtaatttaagcgcaggtaaaaaaacaaaaccaaatgtttcaccagcttgggctttaattttgcaacaatcagctatgtcatgccgtactcgccaatacaaaaaaggcatgcgtgactattatttgcttcttaataagtgagttgtgttatgacaaatgcgaacgattcaaactggataatttatggagcaaatggctacacgggcgagttaatcgctcgtgaagctgtacgccaaggtctaaaaccaactttggctggtcgtaacaaagctaaggttgaagcacttgctcaagagttggggcttggttataaggcttttgggctcgataacgtggatgcggtaagtgaacaactcaaaggctttaaactgatcatgcactgtgcagggccattttccgcgacatcgaaacccatgatggaagcttgtataaaggcaggtgctcactatctagatattacgggcgaaatctcagtatttgagttggcacagtcacttaacagccaagccgaaaaagccgatgttgtgctttgtccaggtgttggttttgatgtgattccgacagattgcgttgccgctgcgctcaaagaagctctgccagatgcgacccatttggcgcttggttttgattcaaaaacagggctttcaccgggtacggcaaaaacaagtacagaaggtatggccgaaggcggcaaaattcgtaaaaacggaaaaattaccactgttccattagcacattatgtccgtactatcgatttcggtgatggtaaaaaaagtgctatgagcgttccgtggggagatgtatctacagcgttttatacaacgggtattccaaacattgaagtatttgttcctgcgcctcccaaaatgatttttggtgcgaaaatgatgaactgcttccgccctgtattaaaactcaatgccgtccaaaagtttattaaatcacgtattgaaaaaacggttgttggaccaaatgaggaactccgcgcgaaagtacccacctatgtttggggagaagcaagaaatacgcgtggggaaataaaaaccgcccgtatccaaacggaaaacgcttatagccttaccgtaaatgggtcattgactgtggtgaattatttactcaacaataccgttaaaggcggtacatatacacctgcaaaactgatgggttataagctagtgaccgagttaccgggttctggtccgttggtcattaattaaaagcttttattaaaacagcatgtttatagatcgtcccgaataaggagtcattcttgttcggggaatttataaatatttcaaaagaatacagtgcataagtataagaaaaacagaaaacaaaatactccataagaaatcatataaattgaatatactaaaaacgataaattttttataacaaaggaatgagaataatgagaaaactcatactatttctacatgcatcgcttgacagttttgttgaagggccaaatggggcaatggatataggttggattgcttacgatgccgatttggcaaatcatgcaaataaaatcttgaactctgctgatacggtaatttggggacgtgcgacatacaagatgatgcataattattggccaactatgctttcaaatccagaagcttcagagcatgaacgaaatcatgcagaatggattgaaaagacagagaaaatcgttttttcaaccacattagatacagttgaatggaataattcccgacttgtaaaagaccatgttgaagaagaaattaataaactcaaacagcaaccgggtaaggatatggtgattttgggtagtccacggttcgcgcactatctgatgcaacttggtttaattgatgaatataaaattacagtttcgcccgtgctgcttggtagtggcttgccactatttcaaggtattgagcaaaagaccagtcttaaactcattgaaaataaaacgtttgcttctggagctatcggtcttcactatcaaaagataagctgattttttctataacatgtatataaaaaaacgaattactgattaattctgtaattcgttttttaaatttatgaaatgctacttaatcgcttgaattacttggttgataacaatacgtatcgtagtttcaatgtgagaagccttaactcgttttgaacttaaaactagggtgtttttaccttgtcaaaatacagattcataagacgttctgcattttgctcacatgtaatttcatcaggtttgttgttgattgcatcaatcatggtatgtaagttttgcttactgatttttagcttttgttctaaaagctctatttcctgaattttggtttcaatcgtttgaataagggcatcatggtcccaaacagcaactttcgagggcaaaaatgctttaatttctgctaaagaaaacccgacttgctgagcttgctgaattaaagaaagttgtttcaaatcgttatcggtatattcacgatagccattcgatttccttttggctttgggtaagagtttgatttgctcgtaataacgaattgtaggggtacttaaaccacttagttttgataactcgctaatattcatagccacatactctcttgacattcaagctaactttagacttatagtaacataaaagcaaggttcataactttaccaagcacacgttttcagtaacaactttctatgctttgattgataaaagatagaactataaagaagaatgaggtgagaaaatgtctaaacgtatattacacatcgtgaccaatgtttcacgctataaggatgtagatcaacaaacaggactgtggttaggtgagctcacccatgcttatgatgagtttgaaaagcaaggctatatacaagatattgtcagcccaaatggtggaaaaactccaattgaaccaaaatcgcttgtgcctttggtggcggataaatctgttaaagaccgagaaaaagatcaagcttttattacgctgctggcaaatacttttaagccttccgacattaattggcaagactatgacgtgatctactatacgggtggtcatggtgtaatgtgggattttctagataaccctgaactgcaagaaatcaccaaaaatatttatgaaaaaggcggtattgtttcgagtgtttgtcatggctactgtggcttgctcaatgtcagactttcaaatggtgaaagacttataaaaggcaaaaagttaacaggctttgcatggagtgaagaagttttggcaggggtggcaaaaaaagtgccatataatgccgaagagttagcgaaagaatatggtgctcgttatgaaaaggcttttattccttttgcaccgtatgtcgttcaagacggtaagttaattacggggcaaaacccgttttcagctaaaaagacagctttagcgataatagaagagctagaaaagtcataatttaatgattcaaatataaaccctaaaagcaaaacagcgatgggcttgcttttagggttttaaataaatggattggtgtaaaaaattaagcttaaggaacaatcacaaaatcagggtttgctattgcaaaaactgcttcatggtctgcaactggtggataaatccaaacagtattaatttcctgtttaatttttttcgcttcttcacgcacaaattgaacttgtcgatcccaaccttcagtataaagtgcgccccaaggacccaagtcaacacaagtgacatactttggttggctgtatggatgaagtggtaaatcaaccaattctgccgcagcgttataacccgccacacggcctaagctcatagcatgctgacacgacatcacattaaaattgcctaaatcatcggttggaacttttacagtatcgccagtcacaaaaatgttttttgcttcaggtgcatgtaaataagcatccccaatcaaacggcctaaattatctttttcaccagcaatttgagaagtgagggggttagcccgcatgccggcagtccagatcacggtttctgtttcaattttttcgccgttagaaagcgttacgccagtggcatctagcgcagtaactcttagcccagctttaccttcaacaccgagttcgttaagggcctctcgaataacagtcgcagcttggtcacccattgccgcaccaatgtctgtcgaggaatcaaccaaaaccacacggacatcagtttcacctaaaatgctacgcaaacgttcaggcatttcggtcacggtttctaacccagtaagaccacccccagcaacaactacagtgttacgtgccgcatttgcaggtttatgggctaagtttttaagatgttggtccagtttttcagcatcttctaatgtatttacgctaaatccatattcttttagacctggtataggtggcataaaagtcgtacttccggttgccagaacaaaacggtcatagcttaaattttgcttgttgccatcggtggttgcaacttcgatagtttgttggttgacatcaattttatttacccaacctgccagaaatttaaccccaaccacgcttaataactctgaaatatcagggttcatgttttcaagcacagcttcataaagacgaggacgaatcccgacatttggactaggggaaaccatcatcacttcaatgttttgttcttgtgatgctaaatggattgctctttgtgcagcgagtgcagcccataaacctgcaaagccagaaccagcaataataatacgcttactcattggattatccttttgatcgatttttcggacaacacgttccagctcatcataaaatttagggtgagcgaatccattctctgattgtccgaaaaaatctgagaaggcgtttaaaacggattagggatgttttactttagtatttgagggttattagctcattagtcgggagtatcccgcgatattttacttttccgcatttttgctgttcttccttcaatgcgttcattgatccaaccatttacatcactaaaaaatacgtcaggggcataacggccaaaacggtctgcaatatcgccaagtgtatgagcacctaatgcgtctcgcatagctttttcggcttgtagcatgacagcatgtacggcacacacaccactggttgcccaatctggtggggcattgttaaagactgcacatttaccgcgaacttcttgacactcaaaaagcggtttttcagcttcgattgcattcacgatatctaaaaagctgatttcgtgagcagatcgagccagtaaatagccgccgcgaacaccttcttgagcaacaaccagacctgccttttcaagtttaggaaaaatcttggccataaaactcggagagactccttgtaattcagcaagatccttactactcaaaggtttatcttcattgttcacaagaaaaagaagacagtgaatcgcatactcgacgctactagtgatataagccatttaatttcataattgatcaactataaacacagactaatgtagtctgtgttttaagtcaataataaaactgagacaaagtttgtcctagttttatttggaagtggtattgaggctagatgtgtagggtatataactaaatttaaatacctttaaattgaaatttaataggataaataatttaaaaaattatcggaaaacttacgaacgccaccaataattttcaatatttggttcctctaagttcaataattcacccatttgcggtgtgctaatcgctaaattattttgttgagccaaagcgacgatacgttcaaaagggtcgtcccaagcatgaagtgccaagtcaaaagtaccgttgtgcacaggcaacaaatgacgtccttttaaatcgatatgagcttgtaaagtttgctctggttgcatatgaacatcgggccattcggggtcgtaagcaccagtttctaacatggtcagatcgaaaggaccgtaacgatgcccaatctctttaaaaccgtcaaaatatcccgtgtcaccgctaaaaaatacacgtaagtcattatcaataatcacccacgacgcccaaagcgtcgcattgctatcacccattccacggcctgaaaaatgatgggcaggggtagccaccagttcgagtccatctacatgtgtggtgtcccaccagtcgagctgctgaaccttttctgctggaattccccatttaataagggtgtcgcctacaccaagtggtgttaagaaatgctcaactttatcgttaagctgcatgaccgcatggtagtctagatggtcgtagtggttatgcgacaaaatcacgcctttaatgggtggtaagtttgcaatactaatcggtggttggtgaaaacgttttggaccaatccattgaaaaggtgaggcacgctccgaaaaaacagggtcggttaaccaaaactcattttgcagttttagtaaaatagttgagtggcccaaacgaaatagagagcggtcaggcgcacttaataattgttcttttgacaaacttagaacaggaatttctctgtctggaacggtatccttgggtttgttaaatagaaacttccacatgagttgaagcgttttgccaaaagaaggcttgtgttggtttggacgtgtatttctaaatttgccattgtgttgctgagatggcattaggggagaagataagtctgttgtatttgaaatagtcatcttatttttccttattggaacaaacctaatgggcaaataagaacttgaactaagtgcttatttcgattcatttaaatgagtatttactcactcattaatccattcaaaaataaggacgccgtgcatccttactttaatctatattgaaactgcatgccaaaatgcttcaaaaccagatttgcggtaacgctcggcttgagaagggtcttgggcaataaaattaagtgtaacttcggcaagcgcacctaaaattgaagcaataaataacggcgggtaatctcttaatttgccatcgttaatacgttcttgaatgttttgagtcaggtcacaaaaggtttgcataccaatttgtttactttgctcagtaatttgttccgatgttgaaagctgtgccatcactttacgtttaaggggagcttctaaactccagtccaaatagctttgccaaatgtgcgacatttgtgtttgcaggtcagcgttagtggggtaactaagcatcatcacctgacgtaactcagcctttagtgaaagatataattggttaagcagttcttctttattactaaaataggtaaataaagtaccttctgctacgccagcaactttggcaatttttgaggtagacgcacgctcgccaagctctgccaatgtttcgatagcagcgcttaaaattgcattacgtttatcttcactacgaggacgagccatatacaaataaaataattgagtgattactcaatcataaataaaaatggaaataatgcaagctaaataaaaagctcttaacgaaggggttttaataaaaaaattgacggtctttctttattttaaataaaagtacctccttaaaaggaggtacaaaagattaaaaatttaataatttaaattgatactaagccagcgcttgaagtcgatgaaaaaattctattttttcaacattacccatgccttctttttgaaagttttggatatgtggtccaaaattatgatgatgttcctgatctttttcactagcccaatgttcataaaatataaatagactaggatcattttgatcttggaataattcataagtgatacagccgctttctttgcgggatggagctaccacttcaataagatcacttctgacctgatcaatcttttctggttttgctcgaagtcccactactaaataaacagcactcattttaatgtgtatcctttgaatagggacaatacaaaacttttattcagctttgtcgtaagagaattggatacccgctgtaccaccagtctcaataaataatttcataaattgaggtacagtttctgagcgtttccaatcacgttgcagttcacagaataactgagcaacactgatcattttgccgcctgcttgttcaatacggcgtaaagcagcttcatgcgctgcaacagaagtaccacctacagcatctaccacaacatatacttcatatccttcagctagggcgtctagtgcaggaaatgttaagcaagcttcagtccaaagcgctgtcataatgagttttctacggcctgttgcttttacggcttctttaaattcggtatcttcccaagagttaatacttgtacggtcataggtagggtaatctttcaaaactttacttaattgtggaatcggtggtttatttaaaccagtcttaacatttacggttgaatggataattggcaaattataaacaatggcagcttttgccgtgcctacaatattattaatcaacagttgacgatccatcgaagcaatggagtttacttgaaccggttgataatcaatgacaataaaagcagagttttctggagttaaaagatgatcttgttttgggtcacggatgttttcactagtcatttttttcacctttattaaatataattaaataatacaaatattatttttgtgccataagtttggtcacttatgaactatataattaagtgagaaaggacggaactacacaaaattaggctaaagaatcctaaaattgaaacagtggtaattgcatgaaaacagatttaaatgatctttattattttgtaaaagttgtacaacatggagggtttgcttctgctagtcgcgaaattgatattccaaaatccaagttaagccgccgcattttattattagaagaaaggttaggggtaagattaatcaatagaaatactcgtcaatttgatgtaaccgagttaggacgagaatactatcatcaatgtcaaaatatgattttaggtgcagaagctgcacagcaagtcattgaaagaaatcaggcagaaccttgtggggtaataagagtcagttgcccgcctgcatggttatatgaccacattgcagatatgatttcaaaatttatgaggttgtatccccaagttaatattcatcttgaagtaaccaataagaatattgacctgttaaatgacggaatagatatcgcgttaagaattagatttccacccttggaagattccgatcaggtcatgaagatttttgcaaaaaatccgcaatgtatagtggggcattgtgagctggtccagcaacatggtatgcccgaaaccccattagatctatgtggttatccttcaattgggttaggtaactcggaacaaaaaagtatatggacactatacagccgagagaatggtaaaatcgaaaaagttatacatacaccacgtttgattgtgaacgacatgattggtgtacgagatgcggtattaagaggagttgggattgctcaattaccttttgccctgatttataaagaaattgagcgtggtgaattaattaatttaatgccaaattgggaattaaaaaatagtattatgcatgcagtttacccctcgcgaaaaggactattgccaagcgttcgagcactattagattttttatcggaggagttcgaaacacttattaatgaaagacccggttttgaataatattcaaggcaagtgaatttgttcttaatgagatttggtcttcaactcaagattaagtcatttttgagatagtgtgtctcattaatatggattttattcggtttttgataatttcataataatgaaagtttaactacagactaaagtgctaaaaacgaaagcattaactttgaatacggtgaaaattatgaataaacacttattactaaacattgcttttttaggttcggtccagctttttacaatgtctaatgcattggctgatgttcccttaactccagcgcaatttgcaaaagcaaaaactgaaaattttgaaaagaaggttcttttatcaaatttaaataaacctcatgctttagtctggggaccggataaccagatttggttgactgaacttgtgacaggcaaaatcttacgagtaaatccagaaacaggtgcagttaaaacagtatttcaagtacctggtattattaatgatccgcatgcacaaaacggcttgttaggttttgcatttcatcctgattttaaaaataacccatatatttatatctctggaacttttaaaaatcctcaggcaacagacaagaactctccaaatcagacaattattagaagatacatctataataaatcaacagataccttgcaaaacccagttgatttattagcagggttaccttcttctaaagaccatcaggctggtcgtttagtgattggaccggaccataagatttattacactttgggtgaccaaggccataaccagttaacgtatttgtttgagcctaactatgcccaaagtcttccaacccaacaagaattaaagaataaagacttccatgcctattctggtaaagtcctgcgtttaaatttggatggtagtattcctcgtgataacccaagttttaatggtgttacaagtcatgtttacacattaggtcatcgtaacccacaaggtttggcatttgcaccaaatggtaagctcttacaagctgagcaaggcccaaattctgacgatgaaattaatttggttgttaagggggggaactacggttggcctaatgtagcaggctataaagatgacagtggttatgcctatgcaaactattcagccgcaaccaataaatctcaaattaaagatttaggacaaaacggcataaaagtagcggcgggtgttccagtaacaaaagagtctgaatggactggtaaaaactttattgcacctttaaagaccttatttaccgttcaggatacttataactataacgacccgatgtgtggcgatatgacttatatttgctggccaacggtagctccatcttcggcttatgtttatacgggcggtaaaaaagcaattccaggttgggaaaatactttgcttgttccatctttaaaacgtggggttattttccgtattaagatggatcagacatatagcacgacctatgatgatgctattccgatgttcaagagtaacaatcgctatcgtgatgttattgcaaatcctgaagggaatactttatatgtcttaactgatccggaaggtaatgttcaaaaagatgatggttccgttacaaaccaattggaaaacccaggggctttaattaagtttacctataaagctaagtaaaataatgacaagaatctaaaggtattcctttagattcttttgtatatctatataaggttattggtctttttaactagttgtagagggtgcctaataatatttaaaaagtactttttataagttactaagaatgaaaggcgtgcttttttatataggaaattacgtttaatttacagtaaggagagggtgagaatttaaataaatacaaaaagataaatcaaaagatgagtagtatatgagttcagaagcacattcaattagcttgattgcccctgtagttttattggcggccgcggtaattgcagtccctatttttaaacgtattggtttaggttcggtattaggttatctcattgcgggtctgattattggccctttcggttttgcatttttccaagattctaccgcaatcttacatattgccgagttgggcattgtgatgtacctatttgtgattggtcttgaaatgcagccatcacatttatggagtctacgacgggaaatttttgggctaggaacactacaaatcataagctgtgctgtggcattaacaggcgtaggtttgctatttggttttacgtggcaagttgcttttatcggcgcagcagggtttgtattaacatcgactgctattgtgatgcaactactgggcgatcgtggtgacttaactcagcctcgcgggcaaaaaattgtagccatcttattatttgaagatttattgatagtgccattactggctattgttgcttttatggcaccgaatcatgtggtcgaaagcacagcggtacgtttagaaaatataggaattggtttattagctattgcgggtctgattgcagcagggcattggttacttaatccattatttagaatcttggctgccgctaaagcaagagaagtgatgaccgctgccgctttgctggtggtattgggtgcggcattgctcatgcaagtgagcggtttgactatggcaatgggcgctttcttggctggtgtgttgctatctgaatctacctttaggcatcaaattgaagctgatattgaacctttccgtggaatcctgttaggcctctttttccttggggttggcatgtcactggacttatcagtggttgctcaaaactggcagcttattgtaagtagcgtaattgctctcatgtttgctaaagccatcatgatttatatggtcgcgcgagtaactaagagttctcatactgaggccttagatcgtgccttattgatggctcaaggtggcgagtttgcctttgtacttttctctgccgcattaagtgaacaagtcattgatagtactattaaatcaaacctgactgctattgttgtactttcaatggtgttaacccccattgtaggtattatttttaagcgttttactcaatctaaggcgagtgtttcattagaaaacatcaatattgccgagggtttaactggtaatgttttaatgatcggtttcgggcgatttgggcaggtaaccagtcaattattgttggcaagaggagtagacgtcaccattattgataataataccgacatgattcgaaatgctgaaagatttggttttaaaatttattatggcgatggttgccgtttagatattctacatgcgtctggagccgcaactgcacaagcaattgtagtatgtgtagatagtaaagaaactaccaatagaattgtagaactcgtgactcatgaatttccgttggcaaaattattagttcgttcatatgatcgtgagcattcactacatttagtcaaacaaaaagtagactacatgattcgtgaaacttttgagtctgccattaaatttgggggcgttattttacaagaactaggtgtagatgaagacgaggtagagcgaattaccgaagaaattcgagatttggacaatgagcgttttgaaactgaaattgccgccgatgatgtatatgccggagcggatatgcaatatacgcatgcacatcatccgagaccaacagcaccattaattcggccaaaacaggaagggcgtattttaaataaagatgatgcttcggataatgaaaatatggatgggtaaacgctccaaaatttttaggtgaaaatctggaggttaaagagttgttaacgacactcatggctataaggaatccggtcgattcttttttgtaaaattgacggattcactacgctttcatacatttgtcggtacgttaaacgatgatcttcattattatgatagttaattagttcgagtaacttaagcctatattctttatgaccagcgtggtacattgccgcataatttccccataatgcatattggtaccataactgtgctttaggaattagatttatttcgtttaaatagctggacgcagttttttcataacattgctttataagtgatatatcttttttcatcctttttaagaaaatacattgcgtttcttgaagcttggaattattagctttcgttaacattttttctgtaatgacataagcttgttcaaggcaacctagacgaataaggattttccttttagtttttaaaatggctaaattatcttcattagatggcatggtatttaataatttttttaattttaaattgatcgatttttggtcactgttgttaggtaagttataaataatattgttgtattcataaatatatttattagctgttagttggtgtttcggcatatattcctgattatttatagttaatgcagaatcctcactagttttattgcaagcaaccagacctatactaataaaagaaagtgctaaaaatttatacattacaattttacctattttattagttaagagattaattaataacattaaaaaataggtatcaatattgtataattttttactatatattcatatagaatatagctgttttgataaaatcaatttaatattgtttttcttgtaatttattgtttttatgcattgtttttataattttaattatgatttataaatagaaatctaatatttttatattaatcgctcacacccatataaaatgagtgaagcgattaactaataaaaattatttcttatcatctctccaagctttttgtacctgactagcgatagcaggataatccataacaaaacgtatatgagactcaacacctgtttttaaggttgcatcatctacaataaattctggactatggttaggagctgctttactcatatcttgatttttaggagtcgctccgagtgaaatataaagcgagggcataagcttgccatagtgtgcaaagtcgtcacttgcacttgcattagtctccatacgatgcaaattatttttaccaaccgtgttttctaatgtaggcaaaattaattgagttaacattttattgttataagttacaggtgcataaggcgagagttcaatctcagcttttacattgtttgcaagcgcagtatgagtgaccatttcaggcaattgttgaagaatattttgacggatatcttcgttattggtacgaatagtaccttccatatcaacttctttcggaataatgttggccgcagttccgccggaaatatgtcctaccgttatcacggccatacctttagtaagatcagaacggcgactgatcatcgtttgaatattattaataatggcagcagatgccacaattggatctcgaccagcccatggcatggaagcatgcacttgctgtccagtcagtttaatgcggaattcatcagcactgttaagcatagcttcatctttatagaaaatgctgccacttggaatacctgaaacgacatggataccaaacatgacttcaggttctggctttttaagtgcgccgtctgtaatcatttttcttgagccgatttggtcaccttggctaaaaccagccaaatcagcagctccttcttcagaaggttggaaaacaaaaacaacagtgcccgcgaatctattcttgttttctgcaagtatttttgctgcacctaatagcatagccgtatgtgcgtcatgaccgcatgcatgcataacaggttgtaactcaccctgatattgtgcttttactttgcttgcataactcaaatttgttttttcttcgatgggcaaggcatccatgtctgctcttaatgccataacgggaccaggcagatcgccttttaagattccaataacaccagtttttgcaaaaccttttcgaacttcgatcccataagacttcaactcattttgcactaattttgaagtgttgaactccatgttcccaagttctggatgctcatgaatataatggcgaatttgaatagtttttgattcatttttagaaacagagtctttaatccaatcggcaaaacttgtctgggcggtaatgagtaagggtgtcaccaacaacagtttatgaaatcctttcatcgtcttttcgaaagatttattaaataaacaatccatgttttgcctcaatagtcagttcttatttagaggagaacaaacggacaaaatgcccggttctcaatattaaattttgtgataaagcgtatttggcgttatggctatgcatggttcatatgtatattcacaacctaacatgtatatacaactttatgcatataaaaatagcttatctaataaaaaaaatgcaatatttatctaatacttcttaatcatttttattaagttaagcttataggcgtataaggggacttggcgtatacaacatttgaaaaaaatagaggcggagcttgtacttataaaacagtgttcaatattactttatataatgtttagacaaagtacctaatacaatgaaaaacaataattaattaaataatttctagccaatttcacattgacagctcaaatattgaagattaccatttgcgggctggcctacattgccagtcggttttgacggaccgatgattcgaccacatcaggattatttcttctgaggagtagtcttgtgtgcacccccgttccctcccgtagcggtaggacgggagtgggacaccttcgggtgtgctggatgtcgaacccagtccgtcaacctgcttccgttctgccaccataatttataatgctttggcagaactcccaaaagaaggagttggctatgcacgttcataaattatcggcagtcactgtcaaaatctatctcgacacaacttaaaattttaaagcagtttgatgagccataggcttttcaggctttaaatcattacgtctaaaacttagcaacaataaaacttgagatgtgccaagcacagtctttacggctttgctgtgcctttttttctcccagaaaaggcacaggctttttaatcccttttagaaacaacaagaatttataacggtaaaactatgcaaaatttaaaaacttcttccaaaaaattacaggttattcatactgccatacgtctatttgttacttatggttttcatacgacgggtgtagacctaattattaaagaagccaaaataaccaaggcgactttttataattactttcactcaaaagaacggttaattgaaatgtgcattgcttttcaaaaaagcctgctgaaagaagaagtacttgccattatttactcaagtcgttaccgcacttcaaaggacaaactcaaagaaattattaacttacacgttaaatttaatagcttatattaccttttgcttaaagccttttttgaaattaaacatatgtatgcgagcgcttaccgtatggcggttgagtatagaaaatggctacttcatgagatttttgacctcatttttagtttagaaactcatgcattaaaacccgatgccaatttggttttaaacctaattgatggcttgatgttccagattttaagctcaaagagtttggaagagagggatgtggtggtggagatgtttctgaaaatttaattatttgattttcatctaaattattaagtttttatgtagaataagttaataattgaagaagaagtttctttgacagatttgttcggaagttagcaaaatcattcctaatacacacttaaaataggctcaagcagtataaatattaataattactggaaatctcatattacataaacatagagaaaaattgaataatatgtttttttgtgtaaaataaagttcttatacgtacaattctgtatatgtgatgttaactaagaactttataacttcttctattattctttttgcgggttttcaccaatatgtttatgcgattgaagatgtctctttacccagtcaggtattgcaagatcagcgtttaaaagagctcaaccagcaattacaagaccagcttgctcagcaaactccttatcaaaacaccaagccattacaggactttaagcatctggttgttgaagaaagcccatgcgtaacggttaaagaaattagtcttatccctttaattggtcagtcggaatctgacttacagcaatttaactttgtgattaaggccataaaaaaacacccacagaatattttgggtaaatgtattggtacccaaagtttgcataacattgtgaactatgcccaaaacgaacttttaaaaaaaggttttattaccagtcaaattgtcgtgagtccgcaagacttaaatcatgggaatctaaacctgagtatacaaatcggacgcttaaataagattgttatacaagaaggaaaaatttcctcattacagcttaagactgggttgccatttaaagctggcgacattgtgaacctaaaaaggctcgatcaggggctggaaaatctaaaacgtgtctatgcggtagatatgcaaattactcccgcaactgctcaagataaagaattaacgggctatagcgatttaatactcaaacttcaagcactacaaaaagttaatttcaatttaagtgtagatgactcgggtaatcaggacactggtacctatatggggaatattgggataggtatcaataacccgtttcatttaaatgatattttatcgttaaatgtgagtcactctttagatgactttcatgaaagcttaaaccgaagttatttcattagttatcagttgcctgttggttattatgatttaggttttagctataacgattatcaatatagacaaggaactgtagcacctgaatctggctatccagttatttatcatggtaatagccaacaagccaacctgaatttatctcgtgtgattagccgtagcggacaacataaaaccagcgtgtatggaaagctttatcataaagaaagccaaagttttttaaatgatattgaaattaatgtcttacaccgtaaaacctcaggctggaatttaggcgttcaacaccgtcaatatttaggaaatgcggtattagacggcagcatcgattaccgtcgtgggatgggggtgggtgcccgaactgcaccagaagaaaatattaccgatgtttacggaaaccatcttcctgttgaaggttactcccgtgctccactttggagtgcagatctgcgttataccacaccattccttttgcttgataaacctgcccagtaccgacttaactggcgtggacaatatgcaccgaaaattttagtacccaatgaccgcttttatattggtgggcgctatagcgtgcgtggctttgatggtgagctcatgctttccggagataacgggcagtatgtacagcaagaaatcagcttgaatgcaccaattcctaatacccagttttatatggcagtcgatcagggctgggtaaatggccgcaatagcataccgggtcagcgttatttactcggaagtgttttggggctgcgcacctatcaaaatagtttttatctggatgcctttacaggtcgggggctgattgcacctgacagcataaagaaagactgggttaccggttttagtatcaacctttcttattaatttactttagaaaagactttattcatgaacaagaatagttatcgcattatttatagcaaagcacgtcaaatgtttgtggccgtggctgaaaatgtacgaagccaaaccaagacttctggtcaaagtgaagcaagtacccagaacaatattgataacactgaatctcaggcatttcatcaactctggcaagtgaaggcactggttgctagtataagtttgtggatgcctttagcacctgtttatgcgggtattgtagcggacagtgccgcaaatgctgcgaatagagcagtgattggtgctggtaagaactcagcaggtacagtcgttcctgtagttaatattcaaactccgaaaaatggtatatcccataatatttataaacagtttgatgtattggctgaaggtgcagtactcaataacagccgtcagggtgctacgacaaaaacagttggaaatgttgcggccaacccatttttagccacaggcgaagcgcgagttattttaaatgaagtaaattcatcagccgcttcacgctttgaggggaacttggaagtcgcagggcaaatggcagatgtgattattgctaacccatctggtatcaacattaaaggtggtggctttattaatgccaacaaggcaatttttaccacaggtaaacctcagttaaatgctgatggcagtatcaaacagtttacggttgaccaaggaaaaattacggtttcagcaaaccctaattctaaatttggcttggggggaaataataacgatgcaaactatgtggatctctatgcgcgtgcattagaactcagtgcggaacttcgtgccaaaaatgatattcaggtgattgccggggcaaataatgtcagtgcagatttacaggatgttacacctaaaacaggtactggaactgcaccgacattggcggtagatgttaaagcgctgggtggcatgtatgccaataatatttacttgatgggaactgaaaaaggcttaggcgtgacgaacgcagggactattcaggcagtcaacaatctggtgattaccagtgccggaaagattgaacacagtggcacaatcagttcgaccagtaaaacccaaggtttagtgaacatacaaacaacgggtacgggtacagctgccgatatcaactcatcaggcagtattaacagtaatagtgccttaaatatcgattcaggtaataacctgaatgtaaatgctaaagaaattattattaataacggcagcctagcatcttcacctctaattgttaatgccaaaggtaatatcaatctggcagcagatacccgcattatggatgactcacaaggtggtgatgtctatatcgatgcagcaaatatcaatcttgcagcgggatcggaactcaaaagtaaccgtggtacagcaaccatacaagtgcaaaaagacttggtcgcagccaaaggcgcaaaactgattgctgccaaagatttaaatgttttaagtaatggtaagttatcacttacagagaaccatatacaggcatcattaggttcaatcaacttacaagcagattcagccaatacccaaaatatcattgaccttcaaggcgggacgatttatgcgggtaaagatttaaacctgtatagttcaggagatttaaatctaaagaatcttggattttcacttgaaaacgctgcaacaagagttaaaaacattaaagcctacagtggacgtgatctggtctggaacaatgctgacaaggcacttccccttattacaggcatggttcagcttgatgcagccaataatttaaccgttacggcaaaagaaatctcgaataaagacagtattcaactacatgccaatcaaatagcactcaatagtgcattgacctcacaaaagaatattgatgtgagttctgaaattgctgatcttgttttaagtcaggcactcaaggctcaaggtgatattaatctaaccgcacttgctggtggagttactgcaaatagcttaaaggccacatcttcggctggaaagatttctatactcgcgaataaaaatataaatttaaactcgacccagacaagcaaggcgatgccttcagctgataaagatgaattaacaactgatcagacggttattagtggcttaaaaggggtaacacttggctcgattggtgatggcatcgttaacttgcaatcggtacaagttaatgcaagtcagggcgatatattagtttcgagtaataatggaataaatttaaaagctaataatgatgtagttgttactggggatacgggccgatttaaaacggtaaataatgttttaaaaggacaaactgtttcgatagaaaatagtaaatcggatattaaaatccaaaatacagacctcagctctacggttggtaaacttgcgatcaatagtcgagcgggcatgagtacaattatcgacagcgtattaacgtcaaaaggtaatactgaactctacgcaaaagatttactgactttacagggcgtgaatgctacttcagaccagcatctggcagtaagctctggtcgtacggtttatagcaatgctgagtatacgccagcgaccaaatggattgcggataaagtcactaacttaacatctaagggtgtgacctctgtaacggctacaggaaaccaagtattacaaaatacaaatttaaccggtggagccgttttattagaggcgggtggttttattttaggccagactggattgaacttaaatgcggtcggaagtgatttacttaagaatgatacaaagttaaatagtttaaatggtgacctaactattcaaacaaattctaacttaacgattgatccaaaagcttacagcttaaaggctgttggtgatattgagcttgtttctaaaactggtactttgaccttaaaaggctatggtggtactgcggggaatggatcggaacaagtcgttaatttggatacagccaatggtagtatcaatttagagggtgctaaagttgatattcaaggttcacaattaaccgcgcaaaaagatattaagatcgtttcaagtaaagatgatgtgctgattgatggggtaaaaaataaattttctggtttacaaaaattaaatttagctcaagattattctctagaattagataggctaaataaagaacgtttaaagttgcaatcacaagaatattttaatgatttttctaatatgcaaaagaaatatcaatattataatcaagtacttaataaatattgggatcgtagtactttagatcaaagtaaaaatgaaaatgcagtactttgggttaatgcatataatgactatcataaaaattataatgaatttaaaaataagtatatggtgaaaataaattatccaattcttggagaaccccctatattaattaacttaatggatggttctccattttcggcagattacgtttttagttttaaatatgatgataactatcttaatgatgtcaaaaggaatgagctattttacaaatcaaacctaaatggttctgaacattctgaaactaaattgaactcaaaaaatggaaatataaatgttacctctgctaagggtttatctattagtggtggaaatatttctgctcaattgggacaggtgaatttagaagcaagtggtattttagccgaacaatataaatctacaaccattactgagtctaatccacagccaagaatattaaatgcgagtattattattgatggccatacagatttctatgataaagggaatgaaaatgatgataattatagtatgcgaacgttagtcagtcctaccattattaatggtgataaaggggttaacataagaactgtaggtaaaactaaagatgataatctagtcttacaagccacaggtattacatcaaaaaatggtgacgtaaaaatagaatcaaataaaagtattttatttgatgccgcagttgaacaaagttatgaccgtacaacaactactgaaaagaaaaaatcatggggaggtctaaagaaaaaatatattacgactgtagctgagaacaatgatacgaatgcagcttcagttgatatttctggaaaaaatatttttattgaaacgaaaaaactagatccatctgtagatgttaaaaatccagataataatattgatatttattcggggcgttttactgctgatggtggaaaaattacgattaattctggggggaatcttaacttttatacagtcgaagagagttctgatagtaatgtagatattacaaaaaaatcaacgtttgctggaattaaatacaatacttctaaaactaatgcaactcgtacgcaggttactgaattacctgcaacattaaaggcagattacattggtactaaatctggatttgatacccgacttgttggaaccgagtttgaatatttaaaagacgcaactatagaagctggtggtaagttagacttcattgctgcgaaaacatctattactgacctagttaaaaaagaaaagaattctgtagtctggcagtcaatgcaagataaaggctcaattactgaaactgctcagctaccaagttttaatgggccagttttacctacctttaaagcggcaggtggtttgagtgtacaagttccaattagtgaaaaagacgctaataaagttgagttgcgggatgaaattctaaaactggctaatcagccaggaaatgcatatcttaaagaattagttaaccgaaaagatgttgattggcaaacagttttattaactcaaaaagattgggattataaatcacaagggttaacggcggctggtgctgctcttattgtcattattgtaacgattgctacgatgggttcaggaactgctgcggctgcaggagctgctggtggaacagcagcaagtgggactacagttggtttgggtgcaagtatgattggctctgctggtataacgacaactgcggctggagcaattgttccatctacccttggtgctatggcaaatgctgcaattacaagtttagcaactcaagcaagtgtaggattgattaacaacggcggagatatcggcaaaacactaaaagatttaggaagtaaagattctattaagaatttagcggcatctgttgttactgctggtttaatgagccaagttggttctgcattaaatttaaaaccagatagcactcttctaccagaccgactagctaataattttgcatcatcagtaggatcaactttagtacaaactgcgattaaagggggagatctcggagataatttacaagttgcattactagcaggtttagctggagcattacaaggcgaattagctcaaaatctcaaaggtctggaagatgtaaactatattttacataaaattgctcatgcagcagttggatgtgcagcggcagctgctacaaaacagagctgcgaagctggagcgattggtgctggtgttggcgaaattattgcacaagaaatgcttcatggccgaaatccaacattcgtttcagcagaagagaaagctaaaattgaagcttatagtaagttaattgctggtacaatttccgcttatgctgggtatgatgttaatacagctgcaaatagtgcaactatagcaattcaaaataatgcttttaaggataaagcattattaaaacttgaagctacacgtaaatatttggatgataagtctaaagctgctttagatggcttaattaatgcatataaaaaaggtgatatagaagctgctaaaaaatttaaaaaccaattagatgattcagtaacaacttgggctaattcaagtagtagttatttaaatatagaaacaaaatctgccttaggtgagatcgttattgttgttagtgacttagttattcctactaattatgtagaaattttgccagttggtaaactttcaaaagtcgctaaaatattaaaaattggtgaggatggaactaagtctgctgggcgtttagcagaagagcttgcagagttacaaaaagttgatattaaatttggtaaaacattacctggcgctaaagcacctatcactgttacagctgaatcaaatataggtggtaagcatatgttcgataccaatcaaactgctagaccagaggttaatcgaacaaatacaccaactcttgctgctggaaatgcaaaaatagatccaagtaaccctaatttaacaatgaaaaatgcacatgcggaaattgccttaattcaaagagcatacgatgctggtttaacaaaaggagaaactatgcaggtgcttgttagaggaaaagaagtatgtgaccattgtgggcaagtaatgaaaactatgtatgagcgttcaggattatctaaattgattattcatgatacaacaagtggtactactactacttattataaagttattgatgctaaaactaaaattgctacaactaaaattgaagtagctccaatttttggtcattaaggttattgtttagaggttgctaatgattttatatgtttgtagttatgttgtaagaaatccttttttttctgagaaaagaattgatgtgaaaaaaatgggttggggaaaactatcaaatataatcaaggatattttttcttttggaggtagtgtcattattcataaaacagatgctgattattctgaagagtctgggagattagcatatgatgatatcgatagttacagtatggtttgtgattctagatacggttatttgtttggatgcagtattagtgaaaatgaagaatatcctgaaggtatttatttgcgccttgtgaatagaaaagctaaaaatcctgaagaagtttatatttttgagccacatgaagatgaatggcaagcaaaatatgttaatcaagatttagaattggcattaaaattatttaaagatatttatgaacatggcgaattatcatttgagtcaaaaacaatatttgagtaattaaattattgttttattcagcatttaacggtgtaaagattagatatataattaaaaaaccagcgctacttagctggtttttttaattgctacctgtttatatctatctatcaaaactaaaaatagaaaaactgatctttataatcttcaaaatctaaatcactttttgaacccaatgagccttcgataaagttggtatttgttcccaaataaaacgcaatcagggtaccaataaaggaatgcataacggtaaaagagaaagctcccaaagatgagacttttttcttacatattgcttaaaaaatatacagaaacctctctaaaccgagttggaacgctacaaacgcgaatgatattttaaactccactcttcccaataagtgaggtgagctatgaaattgttagctttgattagtatgggagttgcagcgagttattggtataaaactataaaaaatagcaagccaactcttctgaaacctaattttgatgaaatagtaaaaaactttgtattagcagaatttaaagcctaatgcatttgataatcttaattaaataaaaagctcatcggaagatgggcttttttgttggagtaaaaacagacaagcttatagttttcatataaaaataagaaaatattgatccatcttagcttctatatatttgttataaattaaaaaagagaccatcaatgggtctcttttgattaaatcttttatttctaaaacctaaaccaacttttgaaccttttgcgcttttggcaatgtcggttttcttcccaaatacaacgcaatcatggcacccgtaaatgtaagcatacataacggtaaaagagaaatagggaagcttcccgaataatcttttacaatacccataatagagttcataagcccagtaccaatatgcgcaatcgtattcaccgctgcaatacctacagccactaaagtaggtggtaagcgctcagaaaccaatgcccagaaaggacctttaatggcatagttacccatcaaaacgagtgagaataaaattaagctcaaggttaaagatgaagtaaaaatagtaagaagcaaaccaaaactggtcacaaataacggaatagctgtgttgagactcttatttccacttttatcggcatgtacgccccaaacaatcatgaaagcggcagctaaaccaaacggaatcatatttaaaagacctgtctgcatggcagttaaatggaaggcttttaaaatctgaggcatccataacgataaaatattgctggttgctgaacttcctgcataaataattgcaaagaaccataaatatttattggtaatcagcaatttgaacttactctttttctgttcggcactgtcttgtttttcagagttcaacaattgatttttttcaaaagttaaagtgcttgataaccactccttttcttcttgatttaaccatttcacattgttcgcggtattcggcagccataccaggcacaacaaaccaagaaggattgcaggtaatgcttcaagaattaaaagcacttgccatccacttaaacctagtaaaccatgcaagcctaacagtaaggcagataacggtgacccgataaagttagataaaggaatggcaaccataaatacggcaacaattcgagccatatatcgtttagggaaccatagtgttaaatacagtaatacgcctgggaaaaaaccggcttctgcagcaccaagcaaaaaccgtgaaattgcgtatgaaatcgggccggtaatgaaggcggtacagcaacccacaattccccaagtaatcatgattctggcaatccagatacgtgcacctagcttttccattgccatgttacttggaatttcaaatatgacatatgcaataaaaaataatgtcgcaccaaaaccaaaggcagtagcagttaaaccaatttcttggttcatggttaaagcggcgaaaccaatattcacccgatcaatatatgcgatgaaataacaaagaatgaggaaaggaagaatacgaaaagaaagtttacggatcgttgacttttctacttccgatatagatatatcatttttcatacatactccttatgtacgtgagaaaccaaacagctcggtagggttctgatttaaaattaaacattgctcgtgtttatcaaacacaatctgtttaaaagctttaatcgcatcttcataagttattaaggattcatgttgggtatgcggccaatcgcttccccaaatgagtttttgcaaaaaacctttttctttaaaaatgttatatgcctgttgggctatatttatattgttgggtgtagcacccaaacgatagaaaccggatactttaatccagtgctgttttacgttaagtaagcttaaaaatttctgataatctggatcttcaatccctttaacagggtcaactcggccaaaatggtcaattacgacatcaaagctgtattcatccaattgtggcaaaagctgaaccagatatttcggcggtgcgtgtatctcaacttgccagttgaggctttctacatttcgtaaaaatttttgccagtcaggcgtatttagcgcaggagggttaagaccgaatagatttaagcgaacaccaacgattccttgtgccttgagattcactagctcattaaaagtcgtcgtatgttgaacaacggcgatcccttttaaacgctcagggtattgctgaattgcgtttaacatcgcttggttattggtacccaaaaagctgggttgaaccaaaacaccatgcgtgaaattgtgttcatcaagatgagagataaaactttgtacagttgcctcataatcaggtgcataacgtgctgtttcgatactgtggtcctgtgtcgaaaaaacatgtgcatgtgtatctatacagttcattttcatctcacattacaaattttaaagcgaaaatagcgattaaagcggcaatgactcctacaggaattgctttaaataacagttgattaaagaatttggttttgtcgatgtctgctggtgctgaagccataatgaggctaccgccagaggagaaaggagaaatcgctgtagactgagcgccaaccacaatacaaatgaacagcactagtgggtttaggccagaggtaagtgctagcgccggaacaattgggaataaggtaggagcaactacgccgagagtgcttgaaaatacagacataatggcactgatgagacataaaagtactggaatgacccacacaggaacattgtttgctaaccattcagaaagggtagtaataatgccaagcttcacacctaatgcgatgagcataccgacaccgcaaatcatgatcagtgttccccaaggcacaagtgcaatgacctttttctcatcggcaagtttcataagtaaactaatgagcgagaaggtaatggcaaggaaggcaatatcaattttggagtttaaaaagctaatcgtttttacatcgggaaaaacaagatgcaagattggaaaaactaaaacaatcgacatcattaaaataataaggaagatggattgtttctgttttttgtcgaatggttcaggcttttgatcttcaatcacaattgaattactttttctattccacagggtgtaaattcccaacaccgcaattggaataattaaagttaagacaaaaattccactactatatgaaaaagctgtttgcgaggtaatgccagtattttccattaagcttcggaaaataatgccactttgcgatgtcataaaatttgcgccagctaaagcgccgtaatttgcagccatcccaccaataatcatattcatattggtttttttacacagcagcagtgtaatcggtgccataaaggcaagtactgtataaaaaccagcacctaggccagcaataatggttgctgcgaaaaaaatcgctaaaggtaaaaactgaggaaacttacggcatttatatagaagatggctggcaagcttctctagtgcgccatttgccaaagcaaagttataaaacagagtgacagataaaataataaagaaaattttgacaggccataattcaataacttcggaaggtttaagacccatgccaaagcaaccaatcaggtaggcaaacgctatcgtaaaaaatccgatattaattttcgttttataacctaaacctatcgatacggctaaagccatcagcatcaatgcagtcatattatcttccttgataaatatataaacatctaaacatatatatgtttggttttttgtattacatagaactatgctagtattgtcaaatcgatttcataatgtttaacgcaaatgcttgatgagactgcatttaaaaattttaaattgccaagatatgaaaaggtccgttgggaacttcaaaaactactgatccagtcaaaatggacagtcgaagagcctattccaagtgaacaagagcttgcgcaaatgtatagcgtatcggtaggaaccgttagaaaggcggttgaaggactggttgaagatggcttattagttaaaaagcaaggaaaaggaactttcctcaaacaacctaattttgaaaattcgctcattcgtttttttagattacgtaataaaaaaggcgagttcattcagccacaaggacaaattaaaaaagtagaagtgtgtgatgcaatatcggaagtaaacgccgagttaggacttgggcacactgaaaagttgctttatatcgaacgtgtccgtaagcatgaagatgtcgttgtattaagtgagagaatctggctgcctgaacgcttatttaaaaatctggaagaaattccaatcgctgagtttggtaacttactttatcctttttattatcagcattgtggccaatttatttcttctgcaacagaacggttaacttttgagaaaaatattaaagatagctatttaaataatcaccttgaagaccctttagtgaaggtatgccgtattgcaaaaaatcttgaaggtgtagcggtcgaataccgtgagtcttatggtttggctgataattttcattatgaaataacaattaattaattcttgatgcagcttaataaagatttccttattgagctgcagagctggttcactaccgtttatgttaagtatttcttgtaggaagtgagtcattaccccataaatcgagcatcggctattccttgaatgcctagcccataaatggcaaaaacactaccacgcaattggttgtcattagggaaccttggaagtggtggttgcgacatagatgtaacaaacaagacatcaagattttttccaccaaaaactgcactggtaattttttttacaggcatttcaataatacggtcgatttgtccatcaggacgataacgtactaactgacccgaatatacttttgcattccataaataaccttcacgatctactgtcgagccatctgctgaaccaccgtctgaggtatctatcttacaaaaaatagttttatttgagatttggcctgtttcaagatcataatcataagaccagatttcaccttgccatgtatctgcaaaatagagcttagtaccatcaggactccagcaaatactatttgaagtattaatattattttctaatttttctattttatagtctgcatctaatcgataaagagatgcggtattcccatcttcaaggcggttcatagagccaaaaacgaatcgaccttgccgatcaacacgaccatcatttaatctattttgaggtaggtctggttcagggttacaaataaattttaagttgcctgtttcaaagtcgagttgatataacccgtcttcgagcgcaacaattgcgccgttataattttcttgtaaagcaaaagaacctatttttttatgaacttcccacgcccgtatattcccaccgaattcatcacaacagaataatcgtccatcaacaatatctacccaaaataggcgttggcgaacagtatcccaagttgggcattctccaagttttgtttttacatctaccagtactttaatttccataattccttttttagtccttttattcagtcattcatcgatgaaactaaattaatgaaagctaaatataaaaaccaatgaaaatttttctttacctaataagggattgttattggtcctgtgaattaaaaatgtatggaaataaatagctaaaaactaaattgataaatataagttattacgtggtgtagaaatatcattagtaattctaaatcgacttgatagtttaagagtggacaaatgacatagcgttatacgtaaaagcatgtggatgcattttaattaaaaaggaattagaaatgagcctaaaaaaagttcatcgccactcttgggtatcattagtgatttgctggattatctgggtggttgttgcatacgaccgagagttgattttccgcgcagccaatatgatttgtaatgaatttaatttatctccgacgcaatggggatacaccattgctgcaattacactttctttggccgttcttagtattccggttgctgctttaagtgataaacatgcgtctggttggaagcgaggaatttttcagtggcccttagtaattggatttacttttatttcgttgctttcaggcattacatctttaagttcaagtttctataagtttgtaaccttacgtattatggtttctttgggttgtggggtggcagagccagttggggtgagtaataccgcagaatggtggcctaaggaacatcgcggttttgccataggtgctcatcactcaggttatccggttggagcgctacttagcggtgttgcaatggccaccatcattacctattttggtccgcagaattggcgctatgccttttttcttggaattatatttgctgtaccggcattaactttttgggcgatttattcgacccgtaaacgttattcagagtttcaccaatcttgtgtagataatcaattcacaccaccaacagattttgtgcacgatgaaggagaagaaaaaacaagtacggatagtacatgggaacgtttaaaacaaactctaagttctcggggaattgtgtttaccgcagccagtactttaattacccatgtggtttatattggttttttaactatctttcctgcatttttatacaatattgtcgggttagatctggcgaaatcggctggcttgagcgctgtatttacaattaccggcatgatggggcaaattatttggccgactttgtccgataagattggcagacgactcacattgattttatgtggttgttggatggcggtcagcattgcaagtttttgtttaatctcaggcgtggtttccgttattgcaatacaactgttttttggactatctgccaacgcaatttggcctattttctatgcgacagcatcagattatgcaccagccggagcaattggaactgcaaatagtttaattacagttgctcagtatgtaggtggggcagtcgcaccgattattatgggatatttgcttacgagctttggtggctggcatagtcatcaggggtatatctggtgttttctcttaatgtcatgttgcgcgtttattggcgtgattttgcaaattatattgggttatctcattaaaaaagaaaaatcagaacaagttgataatttaagtttgagtgcaaattaaattcttatttatttcaagtttttaatcttatttttatctctgatgagacaccagcaaagtatgtcgatattggaatactttgctggcattgataagaaaactaattctgccaatacggtgtgtctccatagatttctgtaaaataatctatcactgctctaatattaagtggtggatggcggacattgggataaatggctgcgatatgctgggggtgcgatttaatcgcgacttcatattcaggtaaaagctttattaagtcaccttgttttaaagcttcgccgatcagccaatcaggaaataaaacaatccccatgccatgaagcgcggctgtcattaaactctcggcattgtttgaagaaagtaacggggtaattggataatgtacccattcttcattgggctttctcactaaccagcggttaggaccttcaaaacctttatagactaggcacttgtgttgattaagttctgttgggtggtcgagcgtaccgtatttggcaatatattgaggagaggcggctaaatgatatttttgtgtaccaaaaatacgggcatgaaatgatgaatcagtcagtgctccaatacgaaatattaaatctgtgctttcgcgtaatgggtctataaattcatcggtttgaattagttctattagaagccttggataacgctctgataaacccgccaaccacggcgcaatatgccgttgcccaaaaaacacaggggcattaattcggacgagtccagatggttctatggttttatcttgtaaagccttttgagcttcatcaaattgttcggtaattctttttgcatattcaaaaaataatttacccgattcggtcggtgtgattgctcgtgtatttcggtagaaaagttgttgccccaacgcatcttcaagttgttgaatagtccgagaaatcatggaggcagacacatcttctttacgtgctacatttgagaagttttgagcattgtaaacactaataaagaagcgaagcgtgcggatatcaatcgaatttgttaaatccatttgtgcaatttctgcaaaagtgattcatgaattatgctgtttttctgatgaattggctaccttagtattcgttgcctagatacagatgaggcaatgtagatgcaaattctattactactcctaaccattttaggaggaatggggctatcggtcgaagctgggcttttagggccgttaggaaaggaagtaggtgagttgtgggccacttttagtatttttggtgtgggtgcagcacttacttttttactcatgttgttttttagcccacgcaatagcccttcattttttacacttccatcttggcaattgctgggtggtgttcttggccctgcttacgtcattattttgaccattaccactccaattattggcattgcaatgaccatgattggcattttagcgggacaggtatctaaaagtctgattatcgaccactatggtttactggggactccacatcgaaaagtagaccgtaaacgggtagtggcactcatctttattgttgtcgcacttgtacttgtgtcaaaagcgtaggagacagccatgacaattttaatgattcttctcgccgtcattggcggtgctttgctgagtgtacaggctgcaattaatgggcaacttggagcaaaagttggtgtatttcgtagtgcttttttgactttctcggtcggtgctctaattacggctctccttattttttactttgaacctaaacataccttaacgttattagatgttcctaaatggcagttattaggcgccatgtgtggcgtaccttatattgtcattatggtactggctgtacaaagaattggggctgcagttgctactgttgctgtgatttttgggcaacttttgatgagtatcttaattgataactttggctggtttggcaacgaaacgcttcctttttcactgtatcgattaggggcgctaatttgcttagggattgctttatattttatttattcaagcagtaaggataaaaaggtagaagggtaatacaagcttaagattgaaattaatataggtctcattgttagtcgtaaagcctaccaataatgaggccatgtttaatattttaagtactttaataaatgaaagaagttgctgttgagagatagaagtaaaatataagaaatatggtaaagttaaaaacctaattcaatacattaaaattgatatcaagatattgtaggaaaaacatggttaaaattaaacctcacccagcaacaagcggaaatgcatcggctgatcgccttttaactttgttaactgcttttagaataggtgataaatctttaaccctagcagaactcgcagaacgaacagaattaaataaagcaaccataatgcgcttaatcgtttcgctagaagattttggttttgttaaccgtctttcggatggcagatatacgcttgccagcgaagttatgcgtttaaatacaatttatcaagatgctttagatctagaaagacatgtcatgccttgtttacagcaacttgtagatgaaattggtgagacagcttctttttacgttaaacatggagcttatcgtctttgccaatatcgaataaactctacccatcgactgcgtgttcatgttcaaccgggcgaagttcgaccaatggatggagcagcatgcgctcaagcattgaaatcaacatatgaacaagttttagcaagaactgaacctttttattcaacgggtgtaacagaaccccacgcagctggaatggcattgcctgtgtttgatgctcaaaatgaggtagtaggagccttactcatttcaggcccatcaagccgttttactgcggaagttgcaaaatctgtaggtgattttttcttcaaaattgcagatgacttaacgaaaagtttaggtggtaagagtattcgtaattaaatttaatattgtgaatttaatgtcaagaaggggctcatgatttagcccctttcttatttatactatttatgaagtactttgtggttgtgtaaacaaaacagctttttttctagacatgatgaaaaccataatagctgacacgagatttaaggctgcaagtggaagtaaggcgatagcatgacttcctgttgcatcatggattgcgccatagatattcaccatcattccgccaccaatcagattggcacatgcaccaattgctgctaggcctgccgctgttgtagtcggtgacatccatgaggatgctaaagcccagaatggaccttttgcagaataagcaccaattaaaacgatactaagtaaaaagattgtgccaataagtgaagatgtgaacaaagcaattaataaaccaaatgagatcatcaatagagcgattgctgtgtgccaaaggcgttcatttttacgatctgagctgcggccccaaagaatcatggcaatagaagctataccataaggaattgcattcaccaaaccaatttctacattacttaaaccgaatgatttaattaattgcggtgcccaaacactcattgtactgcctgcagcagaagcaccagaataaataataatcatagaccagatgtatttattctttaaaagttgccatagtgaaatatgaccgattggagttttttgttggcgttcaaattgtagtctttcaactaaccaagatttttgctcactattgagccattttgcttgttctggtcgatcagtaagaacaaataaacaagcgatacccagtaaaacggcggggataccttctaaaataaataaccaatgccatccacgcatacccatccagccatctagggataataaaaatcctgataatggtgaacctagaaagtttgcacctggaattgctaccatgaatattgccaccattctggctctataattagcaggtaaccaataggttagatataaaattacaccagggaaaaagcctgcttcagctgcgcctagtaaaaagcgcataatatataatgaggtggagttctcaacaaatgcagttgcagatgaaattactccccacgtcaccataattcgggcaatccatacttttgctccaaatttttgcatggctaagttgctgggtacttcaaatagaaaatatgcaaagaaaaataagctactggcgaaaccaaaggctgtagctgttaatccaagatcttcattcatttgtaatgaagccatgccaatattgccacgatcaataatagcgatgacataacaaattgttaaaaaaggcagtaatcgccacgccaccttgcgcattgtttcgcgctctatcgcacttggttgagagtattctgtagacataaaaaatcctttttatattcaatattttaattgttttcgcatctaaaatattagaaacaattgagtttcatttagctattgagtaacttccagttagcgatagctcgtgggtttagtaattggccattccaaatactcatgatttgttcgagtgctaaaagaccaacacgattgcgtgaatctgttgtgtttgctcctatgtgaggagtcacaaccaagttaggtaattcccataatggattatctttttctggcggttctgaagaaaaggtatctaaacctgcaccagcaattttattattttttagagcatcgactaatgcagcctgatcaattaattcaccacgtgctgtattgattaagatgcttgagcttttcatcttttcaaattgggagtgagaaaataagtgtttattctctgccgtaagtggacaatgtagactaataatatcgctggtttcgattagtttttcaaagtcgtgttcctgctctacataatcgagctctggcaaattttgtagaaacgggtcatatacttttactttcatgtttaagggagccactaacttcataagtatgctaccgattgcccctaaaccaattaagcccaacgttttgccataaagctccacaccattagcactggctttgtcccaatgtccctctcgaatacgttggtctaaccatgtaacttgtcgagcaacattgaacatgagtgcaaaagcatgttcggcaacagattgtgcatttgcacctactgcaatagtgacaggaatttttcgttcagcagcagcttgagtgtcgattgtgtcaaacccaactccatgttttgcaatcacttttaaattatcagaagcaaaaatcatatctctagaaagtttgcctgttcgaacaatgattgcatcaggttgttcatcatggatgagtttttccattttatcttttgccatgtagggttcagttggaatcaactgaatatcatgggactgagcatacagtaacgcatctgaagttaatgttggccccgtaataagaactttacgtttcattttgactgcactccatttaagtattttgagcaaaatacatccttagtaatcaatattattaaaacgctatttcaaaaaattagtcaatagtaaaaattaaatttaaaaaatgagcaaaatttagtttaaatttgattaaaaatgaaatgacatttcaaaaaaaatactgtcatattaatttgcacaaaaaagctgatgtaagggaaaagttatggcaattggttttagagtgctaaaaaacgacagaaaagttgagcaaaaatggattgaacaatatcgagatctaccagtcgctaatgtaagtgactcaatgaatcggatgacttcaggtggagctcaattaaggccaatgcataaaaagggatatctttgtgggccagccattacagttaaggctcgtccgggtgacaacttgatgttgcactacgctatcgatatcgccgaagcgggagatgtcattgtggttgatgctggtggcgatctaaccaatgcattaattggagagatgatggttgcgtatgccattaaaaaaggtatagctggcattgttattaatggcgctattcgtgattcggttgtaattggagaaggtgaatttccactttttgcagcaggaatttcacatcgaggaccttataaagacggacctggtgaaattaatgtccctatcgcaatcaatggaatggtggttgaacctggagacttgattttaggtgatgaagatgggcttttaagcgtgccttatgcggaagttgaagagatttatctgaaagcaagcgccaaacatgccgctgaacaaaagcaattagagcaaatcgccgtaggtgaaaatgatcgtagttgggtgattaacagcttaaaacaaaaaggatgtgaattacccgaataaggtcattcaaaaccattcaaacagaaagggaactagcgaagtcaatgattgagcttcgttagcctatctaaagttaatttaataatcattatcttactgattgaaaaataggaaatttcaattcggtctatgtgatttcgtctaaaggaaaaggacatgaaatataaagggataatttctttatcattattaatgagtattactttgcagcaagccaaagctgaaagcgaagataactcggtgctaaatgaaaaaataattaaattacaacagcaaatagattatctcatggagaggcagaacttaaatcaaaataacagattgaataaagcacctgaattgagtccaaacaaaacatcaaacactgataagcctgtttcggctgatcagactaaaattaaattttatggaaatatacgggttgatgctgcatatgattttgaaggttcaacgcgttcaattgcgaataaaacagggtcaataccattagacaattcaaactcaacaagtaaatcattaaatgtttctgctgcgacttcacgtgtaggggtggatatcgttaagccgacctcgaagggagatttggttggaaagctagaagccgatttcatggggagtggtggagataacggtaatggttcggttcgggttagacacgcttatatttcactaggaaattggttaattggccagacgacttcaccttttgtaaatagtgatactgctccaagtttggttgattttacaggtgcgatgggcacaggaactcagcgtaatatacaggtccgttatcaacacattgttgatgccaaacaaaaaatattagtcgctttggaaggtggtgatgttgaaaataaaaatgtagaaggtggaagtcgttttcctgcattaaccatgcgatatgaatttaagaatccaaatttattggttcaattgcacggcatgcttcatgaaaatcgagcaatttctaatgcgaatgaggagcaaactaaacttgcttggggagcgggattaggcacgaagtttaacctttctggaaatgatgcgattgtattcaattactatcacatagctggtgataatcgttacatgctttattcaaaagataatgatgcattctactttgatcaaaatcgaatgtatttaagtgaatttgattctgtcgagttaggatatatgcgcaaatggaatgaaaatttacgctcttctttgtccgttggtagtcttgtctataaagattcagatttttcagaaaataaccctgatcaaaataaaaggctaatcaatgcaagcgttaatttattttggacgcctgttgaaaaagtcgatcttggtgttgaatacacttacggtaagagagaaacattttcaaatttagaagggaaattatctcgaatcaacttattaggtcgatataacttttaatgtaattacagccactttaatatcagaagtggctttcttttatctgagaagggctaatattgtggaacaaattaattatgccaatgcaagatcacaattttcaaaggtcatggaaagagtgctgttaggctacgccgttaaaattactcgaaaagagaaagatgctgtggttctaatcagtgaaaaagcataccttgaatataaaaatgcaatgtttgagctcaataaattaaaaaacaaagatttttaactcccaactatccgcttctcaagcatctccataaaggtttttaaaataatattatgatttttgcctttcttctatcctcatttacttttttaagctatgaaagctagtgtaattttagaaattattaaaattaaaaccaaattattgtgcttactgactactatagtcttggtaaggtaaattatatcgattaataaaattattattatgaatttttatggattttattattttttgtggtaaattttttgcgttataaataggtttttacaaaaatgcaaaacatacttacttttattaaaaatggtcaaaaatttactttagatgcaagcaatattaaaagtgtaagagatacgggaaatggttttgaaatcactcttaaaagtggtgagataattcaagctgagtcctatagtgttactcctaatactcagccagtggagcaagtttctagtcagcaagtagaaaataattctgaagctgatgaggaatttgaaaaagaagaagttttgaaagaaaagagtttattggattcacaaacaatgttatggggtggtgctgcgatcgcacttggtggtattgcgatagcagcatcaggtagtggtggtagtgatggttcagcaccttctgatcaaactcctccagcaagtttaactaaaatactgtctaaagatggtaaagctgtaagtggtttaacagaagctggagcaactgttatagttgaaaattcggctggaaaagtaatcggttctgccaaagcaggagcagatgggacatatttaattaatttagataaagcctatattaatggtgaaatactaaaagtttctgctcaagatactgccggtaatagtacagttaaacaagagcttatcgcttctgatattacagctcctactttaacacatgctatttcttctaacggtaaaactattacaggtttgacagaggctaattcaactgtcaccgttaaagattcatctggaaaaatcattggaactgcaaagtctgataatgatggaaaatatacagtcatactggataaagcttatttaaatggtgaaaatcttagtatttctgccgaagatttagctggtaataaatcaacaattcaaacaattttggctgacgataaaactgcgccaataggtttaacagttgcaattgatacagcgggtaaattcgttacaggtgtgaccgaagcgaatgctgttgtaacaattaaaaatacagtaggaactgtagtcggtacagctactgctgataccgcaggtaaatactcgattacactagataaagtatatttaaatggtgaaagcttaagcgctactgcatcagatcaatctggtaatgctacagcaccaaaaaccattatcgcaccagataccacggcaccatcaagtttaactgcaagtattggtactgcgggtaaagtagttacaggtgtaactgaagccaatgctgttgtgacagttaagaatgctgcaggaattgtagttggtacagctacggctgatgccacaggtaaatattcagttaccctagataaagcttatctaaatggcgaaagtttaagtataacagcgacagataaagcgggtaatgctaccgcaccaaaaataatagttgcaccagacattacagcaccttcaagtctgactgcaacgattgatgccgcaggtaaagcaattaccggtgtgactgaggccaatgcaacagtaacagttaagaacgtggtaggaaccgtagtgggtacaggtacagccgatgtcacaggtaaatattcagttaccctagataaagcttacttgaatggtgaaagcttaaatgtaacggctgtggataaagcgggtaatgctaccgtaccaaaaacaattattgcaccggataccacagcaccatcaaatctgactgcaacgattgatgccgcaggtgaagcaattacaggtgtaactgaagccaatgctgttgtgacagttaagaatgctgcaggaattgtagttggtacaggtacagctgatgccacaggtaaatattcaattacgctagataaagcttatctaaatggcgaaagcttaaatgctattgcagcagataaagtaggtaatactacaacaccaaaaacaattattgcaccggataccacggcaccttcaagtttaattgcaacgattgatgcttcaggtaaagtggttgcaggtgtaacggaagcagatgcaagagtaacagtagaacaagtaactgctgtttataaagaagtaacggttttagaaacccaatttattctaagtgagtcagtacagacaaattatttatcgaagacatattcttttgaagttacaggtacaaatgcacatgtttctttaaatttgagttcctcgactaattcactttctggtagttatagttcaattctttctggagcgagtttaaatacaagactaactggtaatgtttcccaagctggagaaggcaattacagtattgatttagcacaaggttcggtattaccgcctggaacctatactttgacagtaaattattctagttcaatggtccccgttataaacgtaaatgtaacgcaagaagtgccaacaaccattttagaagtagaccattacgaaacaaaagttgtaggtacagctaatgcagatgaggcaggaaattattctattactctagataaagcttacttaaatggtgaaaatttaatcgcaacagcaacagatcaatcgggtaataaaactgaggcaaaagaagttattgttccagatatcacaccaccgattttacatcaaccaactattcaaggtggatggactgaggggcaagtcgtacaaggtacaacagaagcaaacgtcactgtaactattaaaaacgctacaggtgatgtgatcggttcagctatagctgatgcatcagggtattactccgtaattttgaatactgtttatgagaatggtgagttattaaaagtaatagctacagataataaagggaatgaaaatttgcttcaattaaatgcacctgatactacagcacctatactagctaatttatttagttatgatttgagtacagataaaattatttttaatgcgccaagtgatagttactttgttgaacaaaaaattgatggtgcttgggtccacgtaaatattgaggaaaaattcgattggttaaatgtagaatatagggtaactgctacagatcaagctgggaatagttctcaaccactaactactataattaatactgcatcgggaacttacaagccaacagaccctacatttactcaaattattaaaggatctacaggaaatgattatctatatggtggcaatggagatgacacgttaatttctaatggaggttctgatagtttatacggtggatccgggaacgatacactgatttatggtggtaattccccgaatatatatacaggattaattggtgaagcagggaatgacacctatattgtagataaagcattactcggttcattaagttacgttcatatcttagataatacaaatgaacaaaatacactttatttaaaatcagtttcagctgatgaaattattttaaaacaggctagtgcagatagaattattacatttaatgattcaactgccaccatacattttggtgaggggcaattatcctcaattgtatttgacgatggaacagtttggaataaagcacaaattgaagccaatattatcggtagattattaggtacagatggagatgatcatttacaggcagatgctaattattccgtaatttatggtctagatggtaatgatacgatacaaggtggtgtacagaatgattatctatatggtggcaatggagatgacacgttaatttctaatggaggttctgatagtttatacggtggatctgggaacgatacactgatttatggtggtaattccccgaatgtatatacaggattaattggcgaagcagggaatgacacctatattgtagataaagcattattagggtcgttgagttacgttcatatcttagataatacaaatgaacaaaatacactttatttaaaatcagtttcagctgatgaaattattttaaaacaggctagtgcggatagaattattacatttaatgattcaactgccaccattcattttggtgagggactattatcatctattgtatttgatgatgggacgacttgggataaagcgcaaatagaacaacatattgctaaaacagtagtgggtacgtttgataatgatgtagttgagacagctacagccaaccagacatattcatatactttagatacaggtgcagacactttaattttcaaagttcttgatgacattgataatttaggtggtaatagtaatggagagtggacagattttaatctttcagagaatgataaacttgatttgtcacaattgcttataaataacaatggaaaccttcaagaatttataacggtaaaagatacgcaggctggagtagttatgtctgtagatagagatggctctaatcaatccacttatcattcacaagaattaattctacttactgctaagcactatacgttagaggatttaatggcttcaaatgcatttattcattaaatagttgtgatctaacatagaaactaaaaagagaccagtgaatggtctcttttttcttaattatactagcatcctcaaatttattttttagtcgtatccacagaaaccacaacagatagaccaggacgcaacaatttaatatcaggttggttctcaaggagtttgatgcgtaaaggtaaacgctgaacaattttagtaaagttacccgtcgcatttgttgctgaaattggcgagaaaaatgcgccagtagaaggagagaaactgtctaccacaccttttaactcaacattgtaagcgtcgacataaacagtgacaggctggccgattttaatttgttttagctcaatttcacggaagtttgcttctacatacacttgatctaaaggcacaaccaccatgagtggattacctgcgccaacaaagttgcccacatttgcagacttttgcccaatcatgccatcaataggtgctcgaatttctgtatagctcagattcagttttgctttatcaagcgcagcttgggcttgtttcaaagccgcttgtttagcttgaacctggatcttatattggttgagctgatactgcgcatcaatgactttttctttactgctgtccaagtcggcatattgctcggtcaatgtggtttttgactgttgtgtaatcaatctagattcagcaccaagtgcctgtaattgctcatagcgtgcggtattatctttggtgagtttaatgccggcttctacttttctaagctgggcctctgtttctcgtataacagtgggttgtctttctactgccagcattgcttcatttaagtcagcttgtgctttggcataattagattcagcttcagctaaagccgcctgataatcacgtgcatcaatccgtgccaaaagctggcctttttttacggtctggtgatctttaatataaatttcttcaatattacctgacactttgggagcaatggttgagtactcgacgtctacccgcgcatcatcagttttaacaatggaagaaggtaaaaatataacttttaaaatccataaaatggaaactagaacgataataaatgcaataaccataacccagtgtttcttaagatattgcatctttgttaacttgggtgactcggtcatggagtgatcttgggcttcgagagtactcataaagattttcctgagttatgactattcattaacttaatgagagcaatgcgtgggggataagttctaactggcaaaatcaccataacgataaataaaattgcagtaagtcccgctaaaatcaaatattgatcactaatgactaaaactgattgctgtgcctgaatcgcagaatttaaggcagataaaccaccggaaacacgttcggtaccatctgcactcagcacaggcggggtaagaggattaataacagggccttgaatattttgaaaaacatgttgtgcggtattttcaatcagtcgtgttgaatggtattcgccacgtactcgattgacccagtccaaaaggcatacaccgagtacgccgctaatagcacgcggggtgttaatcataggcgaagcataaattgccatagttggatggacgctatttgtacccatcatgaggagcgaaagcactacacaggtttgacctaaacatgagattgcatgccaaaaatagaattggtcttggttccaagtcgtatcaagttgacttgcacctaagcagccaaccataaccaaaagtaaaccaaatccatgtacatatcggctatcaacccaagcttggttcaaaactttaataacaatcgggatatagataaattgtaatgcggcaatttgtaagccaatccacatggtttgagtaggcttataaccatgcacggcgcttaagtaattaaggggtaatgtactggttgacataccaataaccacaaagcagaacaacgcaataacagcataaccaaaatttcgtatttcgagcatttgcggtttaattaatggtgttggatagcgccattcatgtattaaaaataaaggtagggtaatggcacttattaaagccaaaacacaaatcaattttgaatggaaccagtccaaatgattgccatgcaaaagcatggtactaaggcttgccaaaccaataatggctagaatcgcgccagtccaatcgtaagtttttattcttgagtaatttaatggatcttgcggaataccgaagtaaactaacgcagcacttaaagcacaaaaagggatggtttggaaaaatatcatcttccaaccaatcacatctaaataaaaggcagcaagcgcagcgcttaagtttgggaaaaaagttgctgttaatgcatagcaggccaagccccatagacgaatttcaggtcctaggaatctaagtgcacatgccattaataaaggaatagttaaaccattggcgagtccttgtaagccccgtaataaataaaatatttcgatatttgggctaaaaggaattaaaacgctagagaagaggcaaagtcctatcgcaaaaagaagaacccgacgcatggaaaaaataaccgcccaactggtggacaggatcatcccaataatcatggcactggcataaatactgctgacccaataaccagagtcgacactaatacccatctcaccgcgaatatcgaccaaggtaatgctgctaattcggttattaaattcgacagtcatggctgcaaaaattgcacctgccaaaccgatgagtggtcgtatattcatcttttaccttaaattttaaaatgagcttaatgcttatagcggtgattaagctcaactgtaccgatcggtactctactatcttattaaatttacgtcaattctcgattttgaacttttcgatgagttacactaagaatgaaattgctaaatatgtttgtagggtcgtatgtctgattgcactaaaacgaatgagaaagatcaaaaaattctggatgcagcaacaaagttttttctgatccatggttttagtgggacaacgacagatatgattcaaaaagaagcgggcgtttcaaaagcgaccatgtatggttgttttaaaaataaagaagcgatgtttgctgcggtcattgaacgccaatgtaccaacatgcaaaaacaaattatgtcggtcgagacaaaagccaaaaatttacgttcagccttaaccgaaattgggaaaacttatctgtgctttatcttatcgcattccggtttggctttttttagagtctgtattgcagaggctgtaaggttcccggaattatccgaaaagttctttgaagtgggaccacaacgtctagcaaatattattgcaggttatcttgaaaagtcggttaaacaaggagaaattgaattaacgtcttcttcggaagtcgcagcaaatatttttttatcactgttaagaagtgatgcccacctaaaatgtttgactcatcctgattatttaatctcagctgatgaaattagtacttgggttgaatacgctgttgatttatttttaaaaaatattaattacaaactagattgatattaaggagcttatgcctccttaaaaaacctaaatgtagaagtaaaaagagaccaacttgtggtctctttttattttttagatcgcttctctggtcatctcaccattcaccaatcttaaaatctgcaacgggttgctgtcttttaaggcttccggcaataaactttgcggatagttctggtaacacacagggcgcaagtaacggtcaatggccaaggttccaactgaagtacctcgtgcatctgaagtggctgggtatggcccgccgtgtaccatggcatcacacacctcaacacctgttggatagccatttataagtaatcgcccagctttttcttctaatacaggaactacctctgcaaactcggttaagtcagcctcatcggcaattaaagtcgcagtcagttgcccattcatgctttgtaatgcctgaatgagttgggctttatcttcaacttcaatgatgactgtggttggcccaaagatttcttcctgtaaaagctggtcacctgccagtaaaagctcaacatcagctttaaacagttgtggctgagcctgattgccttgttgagtttgacctgccaaatgcttaataccttgatgctcggttaagtgctcaagaccagcggtataactttttaaggtgccggcattgagcatagtctgtgcaggcttagcccccataatttcagtcaggttgctaataagctggctaaattcagctgatttaatacccaagattaaacccggattggtacagaactgaccacagcctaaaaccactgaatcagccaagtcctgtgcaattttgtcaccacggttttttaaggcttcgggcaacatcaacatcgggttaatactgctcatttcagcaaagactggaatcggttgtggacgggctgcggccatatcacataaagcacgaccaccacgcaatgaaccggtaaaacccacagcctgaattaaaggatgcttcactaaaggttcacccacgccattaccgtagatcatattaaacacaccttttggcatatttgatttttctacgccacgttcaattgcctgcgctacaaagtctgctgtggccatgtgtccactatgggctttcaccactacagagcaacctgctgccagtgccgaagcagtgtcaccacccgcagttgagaatgctaaaggaaagttacttgccccaaagactgcaacagggcctacaccgattttaatctgacgcaagtctgggcgaggtaaaggctggcgctcaggcaaagcggtatcaatacgggcacctaaaaaatcaccacggcgcagcactttagcaaacaggcgcatttgcccactggtccgggcacgttcaccttgtaaacgtgcaagtggcaaagcagtttcctgtgagacaatttctagaaaatcggtacccaaagcatcgagttcatctgcaatattttctaaaaaaacagcacgctgttcaggtgtggtatggcggtaagtcttaaaggcttgactggctgcttcacaggcctgattaatctcttgctcggttgcatggtgaaactcataaggcaaagcttcaccagtcgtagcttgaatactttttaataaggttgtaccttgtgcgctgcgtgaaccaccaataaagttgtgtccgataatggtcataacaaatatcctgaaattaatgagagtgtcttggaaggttgtcttggtttacgactcgcatatataaagttgcgggttccaaacaaccaccagtagataattgacctaccatgttgcgatacatttcttgccaaggtgtttgagatggagataccgtcggtttccattcacggcggcgttgttctaactcttcgtcagaaatgagcacgttgacagaacgtttatttaaatcaatacgtaaacggtcattggttttaagtaaggcaattccaccgcctacagctgcttcgggtgacatattgagaatagatgggctggcagaagttccactttggcggccatctcctaagcaaggcagtgaatcaatcccttttttaattaactctgctggtggagccatattgacgacttcagcactgcccggataacccactgtacctgcgccacgaatgactaaaatacaatgttcatcaatgtttaaggcagggtcattgatacgtgcgtgatagtcttcgggaccttcaaaaacgattgcgcgtgcttcgaagctattttcattgtttggatctgataaataggtttttttaaatgcttcgcccactacagacattttcataatggcgctgtcaaagaagttaccactgagcacaatgaaaccggcaccatgtttaagaggttgttcataagggaaaatgacatctgcatttgaggtttttgcatttttggcaatttccccaattgttttaccgctaaccgatgcacaatcttcgtgtaatacaccagctttttgtaattcgtgtagaacggcaggaacaccacccgcacggtgaaaaccttcacccaaatatttacccgccggcatacagttcacaataagcggaatgttttcacccacacgttgccagtcttctaaactcagctcaatacccatatgacgggcaatcgcaatgaggtgaggaggacagttactcgatgcacctaaagctgaggctactgcaattgcattttcaaaagattgtttggtcataattttagaaggacgtaaatcttctaaaaccatttcacatattcttttgccggtcatataggccatttgcccacgttcgcggtaaggagcgggaatacttgcacatgtcggtaaagacatacccaatgcttctgccaaagcattcatggaaagtgcagtgcccatggtgttgcaatgcccgaccgaaggtgaagcagaagtggtcatttccatgaacccttcatagtcaattttaccagtggcaagtaagtttcttgcatgccaaagcacagtgccagaaccaattaactcacctttaaaatgaccatctagcattggcccaccagacaacacaattgcaggtatatctgttgtggctgctgccattaaacatgcaggggtagttttgtcacagccagtggtcagcaccacaccatcaagcggataaccatgcaagatttcaaccaaacctaaataggccaagttgcggtcaagtgcagcagttggacgacgggtttgttctgcaatcgggtggacggggaattccattggaataccacccgcgtctcgaatacccgctttaacgcgttcagcaagttctttgtgatgacggttacatggagtcaaatcactaccggtttgtgcaattccaataatcgggcgacctgattgtaactcggcacgggtcaaaccatagttcatgtaacgctcaacatataaagcggtcatgtcggcatgttcaggatcatcaaaccattcttggctacgtaaaaaaatccgtttattttgatcattcattttttgatcctttcactcatactttttgaaatgtagtttatttaccagatgaatcttgcaattcaaccgatcgataatacgtgaaaattatagtaattcacgctgcttcaaattacgcatcaaagcatttattccaaaattccacggtgttgctttatcactggtcataaccgtgttgtacaaagtaccaagtttaggcgaatggatacggacgacatctccaactttatgggtaaagccagccccagcttgttctcgatcttgagtcggtgcaaataaagtacccaagaacaaaacaaaaccgtctggatattgatggttttcattaagagtttgttgaattaaatcttcaggatctcggctaatttgcgacatagaactcaccccatttaacacaaagttatcggtgccttgaatttgcagttcaacatcgcaagtacgaatatcatttaaagtaaaagtatgatcaaaaaggcgaataaatgggccaatcgcacaagatgcattgttatctttcgctttactcaacagtaaagcgctacggccttcaaagtcccgtaaattcacatcgttacctaaagtcgcacctaaaatcttaccttggctgttggcaactaatacgacttccggctctggattattccactcagactttgggtgaataccaatattttgtcctgtgcctacagctgctaaaacaggagctttagtaaaaatctcggcatctgtaccaatacctacctcaagatattgagaccacattttttgttcgattaaatattctttgagttgtagcgctttttcagaaccaggttcgattgtttttaaattatcaccgattacgccttgtacaacttcacgaatcgattgagctttttgtgcatcgccaccggcttgttcttcaatcacgcgttctaacatgcttgcagcaaaggtaacacctgcagctttaattacttgtaaatcaattggagctaaaaagtatgccttgttggtatctggctcggcgatagtattggcaaataattcatcaattgaaccaactcgtcttccttcaatttcagataaagcttttaaaggatcagcactttcaagtaactcggaaatagtatgaaatttttccgagatatcaaaaacttgatttccccttaaaataataggggatggacccgaaatttgacttggaatccacgcacggccaattaagcatccttgagttgcatcatctggtaatgagttctgggaatttaacgtaaagttcatttaaagcttccttcttttatttgaaatcatgatatgtttcttatttaataaacaccaatcgtaataatttaattattaataaccagtggttatcaaaaaggaattttaaaaatggcagatttgacttactcaagtttaaataactggcttaaattcaagcatttggttttattagagacgttagctcgaaccaataacatgcatttggctgccgagcagatgaatttaagtcaacctgccgtaagtaaaatgctaaaggaaattgagggccttcttgggtttcaggtctttgagcggctgccccgaaatatgcctgtaacggcattgggtgaacatgtcattcgttatgcacaacgtgttttgaatgacgcaaagcattttgtcgaagacatcgagattttacggttgggtggacatggatttttaaaagtagggggaatatttgcagcaaccgccgtggtaattccaaactcaattatcgaaattaagaaacaatggccgctactttctatagatgttgttgaacagaccagtgaccatttaatggaaatgttgagtgaacatactctagatttagccataggtcgctttaccgatgtgacgcaaagtcagtttttcgatttccagccgttaggccctgaacccttctgtattgttgtcaataatgcgcacccatgtgcccagaaaaagttttgtacattagaagaattattaaaatggccgtgggtactttatcctaaaggcacaccgattcgagagcgtatggaaggtgcatttgcccgagctaaagtcaaaattcctttaaatacggtaaataccatgtcgatgcagacctttttacagatcttaaaaggcgcacctatggtgggcatgttgccagaagcaatggtgattgatcaggtgaaagaaggacaactacagattttagaaacagacctgattttagatgcccaagattatggaattttgacacgtaaagatgaaccagtgtctgatatagccgcagcatttattaatattttacttaaaaatgcaaaacgtaagtaaagtcctcagcctcaagttatagaagacttggggcttttaaattaaaagaaagcctatttaatttagtcaaaatttcatcataaaactgatattaaaaagttatcaatatttagaaattattcattggaaattattgcaaggactccttatcgtttaattcatgatgattaaaaatctttaagtgaataagaattaggaaaggatccctgtatgaatgtgttaattactggtggcacgggttttattggaaagcaaatcgccaaagagattttaaaaaccggaagcctgactttagacggtaaacaagctaagcccatcgataaaattattttgtttgatgcgtttgctggtgatgatttaccgcaagacccaaaaattgaagtggtgattggcgatattaccgacaaaaccatagtggcaaatattacagaaaaaattgatattgtttggcacttagccgccgtggtgagttcggcagcagaggccgattttgacttgggaatggatgtaaacctttatggccttttaaatttattagaagaattaagaaaaaacaaaccacgcctcgagtcatttttgcgagtggctgcgctgtatttggtggtcaattaccagaagttgtaacagatgatacggtggttacaccaaagtcctcttacggtatgcaaaaagcagtaggagaattgctcgtttcagattattcacgtaaaggctttattgatggccgtgttttaagattaccgactattgtggttcgtccgggtaagcctaataaagccgcatctacattttttagctcaattatccgcgagcctttaaaaggtgaaacggcagtttgtccagtcccgccagatactccggtttttattacttcaccacgacgctgtgttgagtcaatgattaaggctgcgtcaatttcttcagatgcactccaagataaccgaattattcctttaccgggattgaccgttaccgttaagcaaatgcttgaggctcttgaaaaagttgccggtaaacaagcaactgatttagtgcagtggcaagaagataaaacgattcaaaggattgttcaaagttggccggttcaagtgaaagctgaatatgccgaatctttaggtttccaagcagatgagaattttgaaagcatcattcaggcacatatagaagatacccaaaattaatggcagtgatcgccaattcatgtgagagttattatggaagatatcaaaaatgtcactgctctcgaagagcagacaattaagcgtatttcaagtcgaatcatcccgtttcttattattttattcattatggcctttctagacagaaccaatattggttttgctgcgctacatatgaatgatgcaattggaattacccaaactatttttggcttaggggcgggtgtatttttcttgggttattttattgcagaagtaccgagtaatgttttacttcatcggtttggtgcacggatctggattgctcgaatcatgattacttggggaattattgccgggcttatgggatttatccatagtggtacccaatttattattttacggtttttactgggtattgcagaagcaggtttctttccgggggttattttttatttaaccttatggtttcctgctaaatatcgtgcccgtgtcttcgcgactttctatttagggttaccaattgcccaaattattggagcgccaatttcggtcggccttatgcaatggggcaataccattggctatgaaggctggcgtttaatgtatattttagaagggattccttccattattttaggactggtttgcctaaaatatttaaccaataacccaaaagaagcacagtggttaacagctgagcagcgtcaatggctcatgaatacgctagaacgtgaagaaagagaaaaagagcaatctgccgatgctgctttaacaaaaggtgaacttattaaacaagtgtttaaaaatcctttagtgtggattatggcaattgtctattttggaattacgtctggttcaaatgcgatgttcttcttcttaccaagtgttttagagtcgttccgtaacacctttggtatgcaaattagccttatccaaaatggcttactcaccgctattccatatgcatttgcggcggttggtatggttttatggagccgccgttctgaccgtaaacaagagcgttataaacacggtgcttgtgctgcacttatggcggctttcgcaattgcaattgctttgattgtgaatcaaccgtgggcaattattgtgggctttattttgctcgcaattggtgtatttagtgcaattaacattttctggactatccctgggcaaactctaacgggtgttggtgccgcagccggtattggcttaattaattcggtaggtaatttaagtggttttactggtccatatttaacaggctatttatataccaccacgggcacctatacagtagcgttccttgccattgcaggatttgtcgccatgggcggtttagggttactgcttttggcaaagttaaagtctgatagcctaaaagtagaacaacagcgacttaaagtgcggactgctacggagatgaaataatggctcggattggttttgttggaacgggcattatgggaatgccaatggccatgaacttattaaaagctggtcatcaagttaaggtctggaatagaacttcatctaaagcagtaagtttaaaagaagctggtgcatatgtttgtagtgaacttgaacaagtcggaaaagatgtagagtttctgatttgtatgctcagtgatggaaaaacctgtgatgaaattctatttcaagaacgtggtgcaatttcacagctaaaacctgaaagcacggtcatagtgatgagttcgatacctgttgaagttgcaaaaaaacaaagtgaaaaatgtaaagaaaacggacttagatatttagatgcacctgtttcgggcggtgaaaaaggtgctcaaaatgcaagtctggcgattatggtaggtggcgatgctcaaacattttcacatgctgaacatgttctatctgccatggggcggccaattttagttggagaggctggctgtggaatgctggcaaaactcgtcaatcaaatgatagtcgcatctactattgcaaccgtgagtgaaggtttattgcttgccagtaaagcaggagcagacccgataaaactcaaacaagcattaacaggcggttttgcagattctccgattttgcaacagcatggcgaacgcatgttaaatcgagattttaaaccgggaggtacagctcgaaaccagcataaagacattcatacagccgttagctatgctaaatcgcttgagttgaatttacctatagcccaaaaagtcagtcaattgttcgaaaatatgcttgctgccggagacggtgagcttgatcattctggtttaattcgtgagcttgaacgaatgaatcatgtgtaatattgctttaattttagcggtacttgatgaatagacataatcaagtaccgctttttttctggtactaattttttaatagtccacttttattgcttttatatattcttaatatctactgacggagaaaccccaaaaaagcgtttatactctctggaaaattgggacaagctttcataaccgacttgcatgctggtagatgaaatatcgtattcttcggtcattaataaacgccgtgcttcggtcaatctcattctcttttgatactgtaagggactcattgaggttatatccctaaaatgttgatgaaaacttgatgcactcatccccattgtgcttgccagttcttcaatactaaatggtttcgcaaaatttgttttcagccattcaatcgccttcacaattcgatgacctgtagtgcctgccgctacaatacgtttaagacgatcgccttgcgggctcatcaataaacgataaaaaatttccttaataataagaggagacaagatggggatgtcttgtggcgtatctagtaattttattaaccgtataaacgcatcattcagctctgaattgactactccaacagccattccttttttctcagtatttacatctttaaagggaatatgggcctcaagcatgatttgagcaagtaaatatgggtctagccttagcacaattgagagatagggttgttcaacagaagcttcaagcacttgagcaattacaggcaggtcaattgcagtaaaaaggaaatggttagagtcataagtataagtctcttcgctaagaatcacctgttttttgccttgagcaatcatacatagactcgcatccatcatgctgctacttggtttggtcaatgtctctgcacgatataaagtcagtcccgtaatagctgtttcgaatgtgcctttttctcgtgtccattgatcgacaagttgagccaattcttgattatggttagacctattcgccattcagattctaccgattaccctctgtatttttattgtaggcatttcaaataagaaaaatagtgagaagtgcaacaatttggaggattaggcaaatctgtgagaggaatagaacaacaccttacaactttcatttttatactgtttgaacaacgcttaatcctgcatccctcattaaattgagggcattggtatcaatctaggaaaaaagatgaatgttaaggcagtcacgtttgtgaccagtttatttatctcaatgggagtacccgcaatggataaaaaatcagtcacagcatttcaaaccgttaaaaaagccaaccaacaacaggtaattaccggcctagataatattttcacgggtcaagttgcaattaaaccattaactgatgttactgacagtataaatgcttccagtgcttatgtaagttttaatgccaatgcccgttcattttggcatacccatcctaaagggcaatatctcattgttacagaaggagagggactggtgcaagaatggggtaaacctgcggaaaaaatttctgtaggagatgtgatttattgtccacctggagtgaaacattggcatggtgcaagtggaaattctgcgatgacacatcttgctttaactgcaactgatgaacatggcaaaaatgtggactggttagagcctgtatcagatgagcaatataaagaggcgggccactgaaattataaagttcctatttctagccatcagtttgttggcgctgaatcaacagatttatgcagctacccatatggtccagcttcctttatctcaaaagaaggaaataacacaaatgcaaaattctttatccgaacagcaacaggcaatcataccgattgctgcctatgctgcaaatggtgacctagctaaactcagtcaatcattaaaagatggtttagatttagggttaaccattgcagaaattaaggaagttttagttcaaacctatgcctatgcaggttttcctcgaagtttgaatgcccttacaacatttatgcaggtgctagagcagcgtaaagaaagcggtattcgtgacatagagggtaagactaatagcactctaccgaaagattatcaggcacttttacaaggtactcagaatcaaactcagttggtgggtcaacctgtaaaaggtgcactttttgattttgctccagctatagatgagtatttaaaggctcatctttttggcgatattttttcaagggatgtgctgaattggcaagatcgtgagattgctactttgagcatgctttcggctctagaaggtgtagatagccaacttcaatcccatcttaatattgcaaagactcaaggtgttagttctcatcaatttgaaaatatacagaaaatacttgctgaaaaagtaagtctgcaagtgggtcaaaggttccaaaatgtattgaccagttttcacaatcaatcgctctaaatgagctcccagcgaaaaaatcgtcttcatttacattaagcatgagagaaaaaatatgacaactgaagttttaggttatgccgcgctgtcatcagaaactcctttagttccgtttaaatttgaacgtagaaccccccgtgaagatgatgttgtcattcaaattgagtattgtggtgtttgtcactctgatctacatcaagctaaaaatgattggggatttagtgcttatccattagttccgggccatgaaattgttggacgtgttacctcaattggtcctaaagtcacaaagtataaagttggtgatttagtgggcattggctgtatggtcgattcgtgccgtacttgttctgcttgtcattcaggactcgagcaatattgtgaagaaggtaacatccagacttatggcggcgtagatcgccatgaccaacgcccaacttatggtggatattcacaaagcattacctgtagtcaagattttgtattaaaagtacctgaaaatctggatgctcaagctgtaccaccactactttgtgcgggtattaccacatggtcgccgctacgtcactggaatgttggaaagggcagtaaagttgctgtcgttggtttaggtggtttaggacacatggcgattaaacttgccaatgctctaggcgctgaagtgacactatttactcgctcagcaaacaaagaacaagatgcaaaacaacttggcgcacatcatgtagtcttatcaacagatgagaatcaaatgaagtcggtattaaatcaatttgatttaattgttgatactgtgccttataaccatgatttgaagccttatattccaactttagctttaaatggaaccattgtattagttggatatttaggtgaaattagcgcaaattcagtacctatgattttaggtagaaaatcaattgcaggctcggttattggtggaattaaagaaacacaagaactactcgatttttgtggtgagcataatatcgtttctgaagtagagatgattaatatgcaaaacattaatgaagcttttgaacgtatgctaaagagcgacgtgaagtatcgttttgtgattgatatgaaaacactgtctgaagattaattcagacattatttgagctgtgcatactatgcgtagtgtgtacagctcaaagatttaatatcaatgtgagtgttatgatttagaaggaatatatttatgcatagcaaagataaatagcttaaataaaatactaaaaccaaaaacagataagctgagtcctaacacgaggctcaccgctataaacatgattaaattatttgactcgcttttgtagactttttgcccaatcattaaatagtttttattagttagtaaatttggcgttttttttgcttactatctaaggtcttatctaacatacttaatttgattgctgtataaatgatgattcaaaacgtcttgctctcttatggtgtttttttcacatgaaaaatgcactaaataaacacatctttttattttgcactctatttgtgcacggggtgccataatgaagttattggcttcattactcactttactcattctatgtggatgttcctcatctgagcaaaatagaaaaactcaagaaaactcaacctctcattcaatatgtgtttttgatagtacaaatacaaaagtctgtgtagccaaacctgcccaaagaattgtctctttgtttgagtcgggtttagatggcctctatatgctagggcaaggcgacaaagtaattggtatacctgccgaagtatacattcaacctttattatttaatgcctattcaaaaatagataaacgcattgctaataaacagcttgcagcaccttcgcaaggagccaatgcaaccaatattgaaagtctcgtgttgctaaaaccagatctggtgattgtaggaagcgggcagactcaaacgattgaactgttacggcagtttggcatcgctgtatatgtaatggagtcaggcacctataaacaagtgaaagaagaactgtctgaaattgctattctgagcggcgcccaaaagcgagctcaggaaattttaaatttctctgatgaaattgtggcagaagtcgcagccaaaacggcccgtcagccaaataaacaatcgatttactatgcttggtctggtggacgaattttttctacctctggacgagagtcgattaccaatgactttattgaactcgctggtgcttacaatattgttcagaccaatgctaaccagcctaatgtaaatcccgagactctcattgaatggaaccctgacaatattgtgctttggaataccaacccaaaactgatttatgaacgaaaagaattacagggtttaagcgctgtacaaaaccgaaaggtatttaatttgagtcctgcatttatatataacccgcacaccatcaaaatcattattacagcgatttatctaaatcacagtatttatcctgaacagtctgatttaccagtaagtgctttacaacagcgtattttaaccaagttgtatggtgagcagcttgctaaagtgttgatgcaatgaatatggaaaaactgaagtattactggttttacccgttacctttcatcatgatttttatctcattgcttattgggccaactcaaacgttaagtgcatgggattatttgttttggggtgtacaagcggtctttggtacaccatattttgacgctgaacaatttaggctgatgcaaaacattttagtaaatgtcaggctgcctagaattttactgacctttatggtgggagccgcattagcaaccgcgggtaatggcttgcaggcattgtttcgtaatcctttggtcgactcgtatgtacttggtatttcatctggcgctgctttcggtgcagctttggcactttctttaagttggctttcgccaaatctatccgcctttatttttggagtatgcgccgttgccttaacgtatttatttgcacatcaaaaacatgaaagtcagacgtctttagtgatggtgattttatcgggcatgattgtttcgggattgtttttagcaggacttacggttattcaatacctaagcgatccatttaaattacaagcaattgtgcaatggacgatgggcaacttacatcaggcgtcttggcaaaaggttcaatatgccgtgctaccaatctgtattggtcttgctggtttatttgcgatgcgttggcgtctaaacctaatggcacttggtgctgaagaagcgcaggctgttggtgttaacccaaggtgggaacagcttcttttaattgctctggtgactgtatgtacctcaacctctgtggctgctgctggcattattagtttatatgggctgtttatgccgcatattgtgagaatgttggttgggccagaccatcgctacagtattcctgccaatatggtgttgggcggcagttttctactcatgattgataatttttctcgggttttactgacgtttgaaataccaattggtatttttaccatgttacttggcgcgccatttttcttattattaatgaaaacacagaggactcattgggcatgattcaaattgatcagttaaattatgcctatgggcacaaacaggttcttaaaaatattcatctagagtttcccgaaaatcagttttcagtgattttagggcgtaatggttgtggtaaatcgacactgtttaaattgatggcgggcctagaacctgtaaaagatggcttgattcgttactctggaaaagcactatcggactttaaaggaaaagatcgggcagccttactcggttttttaccgcagtttcataaaaccgtatttccatttttggttaaagatgtggtgattacggggcgtgctgcttttagcagatatagaccttcaaaatcagactgggaacgtgtagaccaagctttgcttgatttagacatcgagcatttgcgtgaccgtccttataccgagctatcgggtggcgaacggcaattggttatgattgcgcgtattttagtgcaagcaccgaaagtcattttgctcgatgagccaaccaatcatctcgatgtttattaccagtcttatttaatgaaaaagttgcgtcagttgtcgaggcaaaattttacggtgattgcaattatgcatgatcccaacttggcttttttatttgcagatcatttgttttttatgcgccaacacgaagtagttaagcctgaatctaaaactcgtataaccgatcctaagtttttaaaaagtgtctatgatgtcgagtttcatgaagccatgattcaagacaaaaccattgtgattcctgatcattcgtggctgtaaatatgacactttattatcaattggttggtaaatcagactataggtctgcggtagagtttgcactttatacaagacagttgttattcccagaaatttatcatgggcaaattcccaaagatttacaaaattttgagcaacattatgtctatgatccattgggctgttttattacggtaaaagaccaaaatcgtattattggtacgattgcttatcgggcgtatgaccatcgttttgatttaaatttaccgcttaatacggttgaagtcgttaaattatttgtactgcctgaataccgtcgtaatggcattgcaaccatgctatgtaaaatgttgtttagtcatgccaaaaaccatgctattactagtttgtatttgcatactcatccatttttaccggcagctgaagagttttggactctacaaggttttgaggttattcaacgggaatggaccgatacctatgacaccattcacatgagtaaatctttatagcgctttatcatgcgtatgaaatcttttttgaaaatgggtaggtggataacccataattttactgaacattgctgtaaaagctgccgagtgttcatagcccaaactaaaggcaatttccgtaattgagatattttcttttaacgcatttaaagcatagatgatgcagactcgattacgccaagcctgaaaggacatgccagtttctgtcttaaaccagcggtgaaaagtccgttcacttttattatggtcatgtgcccaatctttagggctgctatgaatatcaggatgctgcataaaatcagcacactgtttagatagcaatgtgttgtgaggcaatggaataaacagaggcagggctggtgcagcttctagttcatataacaataaatcgataagagaaccatcacggcctgcacgttggtagtcaataggcagttgatttgcctgaatgagcaattgatgtaacaaaggcgagacttgtataacctcgcaatagtttgcttgtcttggggcattactcacttctatatacaaactataagtactgactttagataaccatacccgatgtggtttgcctgctggtatccatacaccgctgtaaggtaacacgagccattgaccatcttcggtttcaactttcatgagtccttcgggtgcatataagaactgagcacggcgatggctatgcgtatctaacaaagtatcagcaggataatctgatcctaacgctagaaccgcttgaggtagatggtctacatcgttaattggaatattacgcatatatttttggctgaaaaaaataaaaagatggcttttctacgttagtttgccatatagctattttatatcatgcctctataaacgtgaggaagatgatgatgctatatgagctatttttatttgggctactttcaggcataaccacttggttatttggttttggcggcggatttgttgctgtacctttgctttatacagtcattattcaaaagtggagcaatgaaagtagtgtcggcatacatgccatgcaaatcgccgtagctacatcagcttttgtcatgctctgctcggcaagttttgcaacctttcgacactatcgttctggacatatagattggcaacaaatccgctttttatggggtggtattgcacttggtggaattgttggtgcggtaatggcctcattgtttaatggaaattggcttcgctggatatttatgagctatgtgttcataacgattattgattgttattaccgaccaggctttatggtgacctcaaggcaaaagcaacactatggtcaaaacagtgaactcattaaagggggcattattggttgggttgcagcacttttaggtgttggaggaagtgtaatgacggttcctttattacggcggcggggcagttctatggcagaggccgcggctattgcaaacattctcacgctgcctttgtctttaactgcaacgctgacctattgcgtattgtcaatttggcaatctacatggacacccaacggatttatcggactaatctggtttgaagctgctttatttttggttgctggaacatggatcggactatatttttcagaaaaatttatttcaaaactacctgatttatggcgggcaaagttatatccactacttttaataatagttctactcgtcatgctttttttaaattaactttttatttcaattaattaaagaataatctctcttaaatatcaaatttttaaatgctctaaaactgcaaattttatgcctcaaatggctttgaaaaaagtttaaaaattagacttgaaatatatagtggctttgtgccactatatattcatcgaaggtcatcagacaaaaagaggatgatatggctatccagcttttagatacggcaagaaacgaaattccagtgaaatttacgcagttttctggtggcgagcgtcatgttcaaattgatgagacaaccttaggttcactatatggcaatgtattggttcgtgcacacatggcctcaagtcacgatgtgatggactatttactacttgaaaatatattgctgactcagggtttaaccattgacctagaagttccgtattttccatatgcacgtcaggaccgtatttgtgcagtaggccaagcgttctcgcttgatgtgatgaccaagttactcaacatcaatgctgacaaaaaagtgggcaaacaaggcaaggtgactgtttgggactgccatagtgaagtaacgacagccttactcgccgccaatacttcttttagcgaagttgtaaacatcagttcagtagacatcatcgcaaagagtgaagcgctaagcacattgttaaaagatgaaaaaacagtgctggtttgcccagacaagggtgcaaaagcacgtacacaaagggtcgcagatgcttttaattctgagcgcaaacaaccactcactattgttcattgcgataaaaaacgtgatccagtgactggcaaaattttaggtacacatgtacatgcgactgatttatcaggcctcacagcggtcattaccgatgatatttgcgacggcggtgcaacctttattggtattgccaaagaactgcgtcgcctcaattgccataaggtcgttctatatgtgacccacggtatttttagtaaaggaatagaggtttttaatggactgttagatcaactgtttacctcagacagctttccacaacaaccatcagacaaaatttcagtaattgcttttgcagcaaaataaagagaataaagatgacgattaaactgaatccattaaacgctatcgatttttataaagctgatcacagacgtcagtatccagcaggcacagagtgcgtgtacgcaaactttacaccgcgttcatctcgactcgctaaaatgttgcctgactttgacgataaagttgtgttctttggtcttcagggttttatcaaacactttttaatcgatacatggaatgaaggcttttttaagcaacctaaagacaaagtcgtggctgcatataaacgccgtatggatagctcattaggtgaaggtgctgtaccagtcgatcatattgaagctttacacgatttgggttatttacctttacggattaaagctttgccagaaggcagccgcgtcaatatgcgtgtacccgtgctcaccgttattaataccgacccgcgtttcttttggttaacgaattatatcgaaaccgtgttaagtgctgagctttggaaaagctgtactacggccactattgcttatgagtacaaacgtttattaactcaatatgccgtaaaaactggcgcaccactcgattttgtacctgtgcaaggacacgattttagtagccgtggtatgagtggaatttatgatgcagctcagtctggtgtgggtcacttaaccagttttattggaacagattcggttgcttcaattgactacgcagaagaatattacaatgccacaggtgtgattggggtctctgtaccagcgaccgaacacagtgtgatgtgtatgggtacagaagacagtgagctagaaacatttaagcgtttaatctgtcagctttatccgtcgggtgttgtcagtattgtgtctgatacttgggacttttggcgagtcattacagaatttacggtggctttaaaacctgaaattttggcgcgacaacccaatgctttaggcttggctaaattggttttccgtcctgactctggtgatccagttaaaattatttgtggtgatccagacgccgaagtcggcagccgagcatataaaggcgcagttgaatgtttatgggaagtgtttggtggtacaacaactgaccaaggttataaagtactaaatgagcgtgtcggtttaatttatggtgactcgattaccctagaccgtgcgcagcgcattttagaagggctagaagccaaaggcttcgcttccaacaacttggtgtttgggatcggcagctttacctataactacttaactcgcgatacttttggatttgctgtgaaagcgacttgggggcaggtgaatggtgtaggccgtgagctgtttaaagacccaattacagactcaggtgtgaaaaaatctgcgaaaggtcttttacgcattgaagaaagtgaaaatggttttatcttgtttgatgagcaaacagccgaacaagaacaaggcggagcacttaaaacagtctttgaaaatggtaaacttcaatatgagtgtactttggatcaaattcgcgagcgtttatccatcgcataactgagtttagatgagccgttgcatgagtatcggctcatcattttcattgagaggctgaacgtgactattcaaaatgaacaagaattccttgccagttatgatcgccgagattatgacgcacctttactcactgttgatatggctattttctcggtattgaatggtcagttgcaggtattactcattaagcgacccaactttccagctaaaaaccaatgggctttacccggcggtttcgccgatttaacccatgatcaagacttgatggcaacggcttatcgtaagctagtcgaaaaaacaggaattgcttcaccttatttggaacaagttgcctcggtcggcaattccaaacgtgacccgcgtggctgggctgtgacgattttgtattttgcattaatcgattttaatgcctatcaacaccaagcgttggctgaatacagtgaatgggtgcctgtagcaaaagcacaagatttagcattggcgtttgatcataatgagttgcttaacttggcattagagcgtttaaccaataaaacccgttatactgcattgccagctagtctcatgcctgaattatttacgctgaccgagctacaaaacatttatgaaattattcttgggcaatctttagataaaaaagcgtttagacgccgtatgatagaagcgggtgcagttgaagaaaccaaccacagtaaaattgtgggcaaacggccagctcagctttaccgctatgcactcgattcttttgattttatatttcctcgttcactcgaattacctagaaataaagagggtgaaggcaagcaaaacaatgagctttctgactagcgcatcttaatgcacttttgatttataatgccgcgcttatgattgatgtcatgttttgatcagcactttgcctatgtcacacgtttctccctgcttccaacaaaatcagttttttatgttggtagaatatctcacttcactgcatgaaatttatcctgtgaaacatgagtttgcagggtatccggctgcaatgacattggcagatcgcgtacattcagatcatgatattgcgccacttgaagccagcaaaagttaccctgactcaatagagaaagtcttacacttttcaggtaaagcgagagacatacaagactttgagcgctttttagaacaagccaagtctgccaatattcaaaacttgttattgcttacaggcgacaaactcaaagaacatcataatggacgagatgggcagcctcgtagtcgttacctagagtcggtaaacgccgtaatggcagctaagcaacatggtggttttcgtattggggttgcttttaatccgtttaaatatgtcgaagctgagcgtgatgcacagtatttaaaactgcataagaagattaaagcaggtgctgactttatcattacccaattgggctatgacattgaagccttaaaacaagccaaatcatttttaaccaagcatgattattcgcagcaaatactagcttgcgtcatgccactgactttaggccgtgccaacttcatggtaaagcataaagttgcgggtattgtgattactccacacatgctaaaagtcttggcaggggaaaaacaggcagggcatacagaccgtgtttatttgcgctgcgctttacagattttaatatgtaaacacttaggatttgcgggtattcatttatctgcttgtcataagccagaagagcaaatgctgcttgaaagttacatcgagcaatacagacatcttaaccttaaggccttagaagagctttggagttcactttggcaagtcaagacaggcaaagagtttacccctgaaattgctcgtttttcacgtcagccaacatctaaacaattaattaaatatcgtcagctacatgttatgcatgaagcaatgtttggatcaaaaattgccaaaggcgtcggacgttttattttcaaagcatctttttgggaaaacgctttgatcgccaaactcttacttaaaacggaagtactgagtaaacatagcctagtcggctgtgaaagctgtggtcagtgccgtttaggtgacactttatatatttgccctgaaacatgtccaaaaggcttagccaatggtccttgtggtggaacaactttagaccgctgtgaatttggtgatcgtgaatgtattcattctgtcaaagcaagactagccaaagcggttaaacaaactgaaatattaaaagagaaactgattccaacggtgcctcttgaaacgagaggaaccagttcttggaaaaactggtatttagcgactgaggcttaagttttgtattaacccttgatttgaacttgttaaacaatcaaatgataggctaaagaacagcaataattaaaaaataacaattagttgccttaattatgtccagtcaaaatggctaccgaggagtatacttaaagcgaatattttgcgttaaaagaaggctgtctcaatgaaaaagttggttgctgcacttgctgtaattgttattttaactggatgcgtttacgaccctgttaattacgacaaaatacacgaccaagagttccaagaccacctcaggcaaaacggttagtaataaaaaaaccactcaatgagtgggtttcattgtttaaaaagcccgactatctaatatatctgcctagccttattatccttcattaatttaaattactattgtttacatgctcttttttgaaaagattcatctattctgcatttcaggaaaaaacggcacaggcagcgcttaaattagctctctatcaatctgattttaatttattcactctttaattgatggatggttggagcagttgggcacgtggtgcgaaacggttcgtatgaaaggaggggatttacctgatggtcttcatatcaatcaaatttactggttgatgcgtgaagcagacagagagcttccaaaaggtaaatcttacattcgatgtgagataagcgattatgaggcagatcagatacaagcactcttacgaagtcttttaaaatctgataaaacagattttacgacgaagtttgcattaatctgtttaatcaaaaataaagtagaaaataaaggattaggtaaagttgctcaagaaacaaaccaatcaaaagctcaagctgctattatggtaagttgcgctagattttatattgcaggtcatgataaaagattgaaaaatcaatagtgtcttaataatggcctggaaatttataaagttagataaagttgtttctcaaaaagagtgtaataattttcttgaaaaagaagagaataagaagcttttgaaactattaagaatacaaaaaacatgcgctgatggtgctataactctaaagctatatcctaaagaaggtgtgcttatagaagatgctttgggagtagcatatgcacttatcggcttgatggttgctaattatttgcaaatcgacgcgcatgatatttgactgtctagacggattgtggcatatttttgatatagtgttcgaagtgtaattaaagcactggtattaaagctcgccaaaaggtgggcttttttatatttgaattaaacttctatgaaaggtggagaaaattctcctgatatctaattttgtcttattaaatagtgatatatttagaatgttaaatttaaaatgagaataattatggcttatgtaatgatgcttgctcgagttttttcctcagaaaaatatgcaaacgaatttattaataacgggaaatttcgcttaaatactcttaatttctttaagggatataaggaagagctctctaataatataggggatcaatacgaaggcataagctttcgtgctacaggtgagcaagaagtcaaagttactatagaatataataatgaaagccatgagattgaggtaaatgaaatttacactcatgataattatgttctaaataataatattttctgtatgtatgccccagctgtagaacaagaaaaaaaatttactttagaggatatacaagaaattgttgcatttcaaaaagatgctgaaaacctaggaaattatttagttttaattgcaaatcccgaagaattttttgaaagatttgctaaaactgttaaaaagctggggtataaaatgaagagagaccttgtagagtacgttgattttaataacagtgtacatgtacctagggataaaattggctttgtcaaaagtgatcaattttctcatcaaaaagaatatagattgatgatcgatgatggaagaaacgtggatgagcatattgatttggaaataggttcattagctgatattacgtatttaattccaacagaagattttaataaatctttagaaataaaggttaaagaagaaaattaattttcaaaatgctcatcatttggtgggctttttacttttctttgttaaaataaaaaaatttaataatcggaaatgaaatggataaccaaaatcgaaatatttattataatttagaattattgcaggcaattagtaattggcaagcgggtagtaatgagaaaaaaggaaataaattaaaagaattatgcgttaatctccctgaaaaatttcgtttacttccaccaaacttggttttgtttagacaaatatccttagataacgtagggctatcgcgttttttaagagaaaaaaagcttcctgagaagatatcttcttggaccacagattataaatttgctgaaaaattcaaaggcggtgtaccttctgaactcggggattttaaagctaccatttttaaaaccacgccactaaataatcaagtaatagtaagtttaagtgaactgtataagtgttctgatttctgtaatgcaatgaaacttaataaaaataagattgataggtatcatgatggtgctggtaaatactgggatacccagtctgaggtcataatggcaacagagtatttggatcactcaaatatatattcaatgggtgggtattcagggacacctgagcaaattgcagaacaagcttcgagagaaaagaatattcctatatctttaactattgatgatattaaagaattgagtagggattacattggaccttggtggttaagtccagaagggacgagacgcgctgttgctcgtactttggaaattgctcgtaatagggggatgctctaaatactgtaaattaaatacaaaacagatggatctagtaaaatagtaaagagtttagcctcctccgagaggttttctttcgtgctatagtctagtctaatttaaagctggttagtaaaatgaatatctctgttggtggtgaactggatgggctggtgatagaaaagaaggaaaatttttgaaagcttctgatttagatccatcttttaaaaccgaatactacaaacagatttacaatcgcgacaatgtcgtttatcaattttggtagcctttaggttccgatctatgaaatgtctaaattagtattagatatcttaagagcacctaataactaattttatcgtttgcctgacgtattacggcgcaaaagagccctgctaaatatcgattattggcggggcttttatcttataattcttgatcaattgttttgatttcaagaaaaatatatgtgtgatagctttgaaaaaattatttcattattagccaatattgctacgattttgggcgcaatattggcatttgtggtttggagcacttggaaagaacaacaaaattacagctttacaagagataaaatattcaaatgttaattagcttttgcaaaactaatcactgcaatagaaaattatttacatatttatgaaaaagaggttccttttagccgtaatagaattaataggactaatttagagttagcaaatgttttattggatgaagtgagaaaagagctcgaccaactttggggaaaatatgaaatagctttgtatagtttggaagtattaaatattaaatataaaaaagaatgtctcgcaaatgtttctgtgattcaaaatcgtttagaaaaatataagcaaacttttaataattctcttacttcagaagaagttaaatcaagttcagaagatatttttggaagacttgcaaatgaaaaggctaatggtttagaagaacttaggaaaattagattaaagcagtaattttttgaaatagatcgcctaaagcggacttttaatggattgcatatatgaaaaaagaagtcggctttcatattcctgttcgtccaatgcttctttgatatagtagtctgctacagttaagtttttaaaaattattagagatcccgatagctgataatgtaatattgtttttgtatatatggggatagatacgtgagactaatacttatagtaattttaatgtcagttggaagtctattgcatgctgaagaaaacgaatcaacggtttgtgaaaagctcaatagtgcagcatatcaaatcatgttagaaagacagtctggtataaagcctcttgatttgcttgaaaagctacttattccattagatcgagataaggaaaatttaatactgaattaccatatcaatcacttttttggtcatgtaagtggtttggcttatgagacacctctctatacaaaagaagatgaaaaacaaaaagcggctacagattttggtttgagaattgaaagaatttgtagaaaagataagacggcattatttgctcctccgcgatttcagacttttgaggaatagttagcctaatgcaaaatcaaaatgaacagattaataatgttgagcaattagataccgagaacgagcaaaagcaagaaaactcggtgcttaattctgtgaatcctgatctagttgaagttaaagatttaattgtagaaatcgggaaagatatagttgattttgcatcatctgttttcgataacatcgatatcaatttttaacttaagagctcccgaatagtgagtttttatatgttataaaaagatttcccataataaggagatcgaagtggaacttacgcaaattaaagtaacaatagatcgagaatatgatctcttcgtaaattcgcacgaatttaagacgtatcagcacgataaagaaaagcaagctagatttttaggccatgcattaacaacattgaaatacccttatacgaacatcattactttaggtggtggtcgatataaagttgttggtcatcatgatttaaatgttgatatcgatctattccaagctccatctttcgtatcaaagcaagcatttaatacttggtttgctaatatcctatctcaacatttatattcttaaaatatattctaaatacatattttaacttgtattatcactatcaaatactgcgctgaaagttttttgtttttttatggcccgtttctgattagaagcgggttctttaatttcgtatttatgtatatgtattagatgaaagtatatattgcttttatcacatagcttattgtttacttcgctggaaaatattccttttaagaagttaataaaatgaaaaattatttaatagggttagttatttctttaggtttaactggatgtgtggtattaccaaacatcgactattcacagccaaaagttgaacgatttaatccagttaagaattggattagtgtagattctgcttcagttaaagatatgcctaatggtaatgaaatctttaagttgaaaggaggtagtgaagtttatgtattcagatatcaagatgaatgggcattattgactcctgcctctgataaacaacaatggattaactttagatatttatgtggttttgctggttgttatactccaccaattgtttatagaaacactaaaaggggcttggataaccagcaacctatttactcagttcaacaacatgagcctaaaagatatagcaataccaagactagaagcatatctactaacactcgtacttcaagaagctatagtcaaacgaccaatagttcttgttattgtacatctggaacatattgtgttgggccgagggggggacattactgccttaatagcacaggttcaaaaagatatcttccacgataaactgtataagcttcaagaagccccgctaaatatcgattattggcggggcatttgttttataataattttcaagataattagttgtttatttgaagttttatgagtgaagagattatttcggcaattgctacaattaagggtgcacaaattcaagcttattacacattaatagcatcatgtgtaggagcagttggcatagtagttggtattatactttcttggtataccgctttacatttacaaaaagtatctcgtttagcagaaacgagaaaaactgtttatttagagtttgctgaagcatattctaagttaatagctggtttacaattaattcaaatcgaaaagcataaatatcaaagtgagctttttagtagtttttctaatttctcaacttgtacagacaaggttatgtttgtctgtaatacaaaaactaaaaaagaagttgtttgctatttaaataatattttaccaaagattgaattaatcatatttgaaatcgcaagttatttcgatttatctcaaagtttagaagttttagtaaaagatcatcaggaaagtttagaaagcttagataggttttatctaaaattagatgaattacatattgataaccctgaagatgagcgatctaaaaatatatttaaattaatagattttaaacttaaacagtcagagaggttaatacaacctatatcagaaaaagaaaaagagcttgaagaaaagcatgaagaaattgccgaaaatattaaaaaatttacaaatgaacttaatgaaggagttactgaagtaatttatttattaaggaaggaaataggggctaagacggatattcatcttgataaaaaattatcaataaattatcagtctcaacttccaaaaaaagaagatgagttgaagtaattttaatttaaattaatgttaaagctcagtacaggttaaattgcctttaggtgtttttttaaaaggatatattattaaaaaatgaagaatttaagtataggattagttcttatgatttcattatttggttgtgccaattccaccgctaagcatcaagacaaattcttagcgcatattcatgaaaatacaccaaatccttacaaggaatgtatggtcaaatatattaaagaccattgggatgaagtttggaaaacttacaatactgaaaaaactggggaggctcgtggtgaaacagatatagtcaatttcatgattggaaagtatctatctgaatgtaaaaaataatacatttgagctaaatttatttttatgtatttaaggctttcaaagccttgagttttcagggttttactaatagccgcttttaagaaagaaatatttttaagtaggcagtatgctttaaaattattttaatatttgcatataaatgttatagaaaaggatggagttagtaataagaataagttcaaaggaagcacttaacctatcttcttaaaattcgatggattccgttaaataggtaaatgatgaccgtacttttagaaaaagatttaagcccatctgagtttacattgttttctgaaatattatggaaacttggctcagggaaagggcaatacaatttacgtgaaagtattcttgcagatattgccatcttgttgcgggctgatttcgcggcatcttatatttgggattcaacccataacttatcgagagaaggcgttatatggaaaatcgacccaaaagccatgaaggactatgagtgtgtttggcaatttaatgatccgattacggcacagcttcgcaaacgtcaaaaaccaacctttgtaaatgaagtcatgcctctcgcagacctaaaaaaaacaccgtattacaatgagtttttaagagcctatggtttatatcacggcataaatatttattttgtccgaaatggtatggatattggtgatttacgtatttggcgtgcgaaagacgccgacacgtttggtgaacgtgaaaaaagaatattaaacctgcttgaaccttattttactcaagccttaccccttgatttatcaacccaatacggtttgacttcgcgtgaacaagaagtggttcgcttggtatctaaaggtttaagtgataaagatgtggccaatttactggatattagctttactacattaagaactcatttgaacaattctatgagaaaaatcggctgtaataatctcactgaaatggccttgctcattcgacattaaagtttaagcaatcctcaattttgaggatgcgaatgaatgagcaatttgtactaagttcctaaaattaaaacttaaagggattaaaaattactatgttaaatacaaatgaaaaaaataatgcgatcgaatcacttgatctatcaaatgcttcagtagatatcattactaaactcattcatgagagaaaagtatcttgtgaagaacttgtgcatcattacttcgatactattgaaaaacagcaagctttaaatgcatttattagcacagataaagcttcagcaattcaacaagctcaatattgggataaatacctactgagtggaaaaccgtgtccagctttgatgggtattttaattgcggttaaagataatattcatgttgcaggttttccaaatagtgcaggtacgccagctttagctcactttaagcctcaaacttctgcccccgttattcaaaaactcattgatcaaggtgcaatcattgttggtaaagccaatatgcacgaattagcctttggggtaacaggttataatactgccatgcatatagaaggtgttgtgggtacacgaaatgccgtaaacccgttacacattgctggtgggtcttcttcgggtagtgcggtggctgttgcagtgggcatggttccgattgctatgggtacagacacaggtgcttctattcgactgccaagtgccttaaatggttgtgtgggttttcgtccaacggtaggacgatattcacaagaaggtattaccccaatttcacatactcgtgataccgctggcccaatagctcataccgtatctgatgttattttaattgatgagctcatcactcaagagccaagaaaagaatcattacagtctcatcaaattcggctcggtattaattcatacttttggaatcatttagatgaagacgttcatgaacaggctcatattgcacttgagcttttaaaaagtgcaggagtcgaaattattccagtcgatatgccaaatttagaacaactcaatcaagctatttcattccctgtggctatctatgaaggcaagtatgacctaattcaatatttgaaagatcatcatgtaaatttgaccatagagactgtagtcgatcagatctcaagccccgatgtacaggcaatttttaaactgaatattcttcctgagttaattcaagaccagacggggcaacttgttcctgttttaccttcgtatgaaaaagcgattagtgaagctcgtccacaattgcttgaactctaccaaaacacatttaagacgcataacttgcatgctttattatttccgacgtcaccgattgttgcaccactagcaaacgaggaagtctattcgattgaaactttccagacactcatgcgaaatacagaccctggcagtaatataggaataccaggactgagtttacctattgggaagggcgtgaaatcaaaactgccagttggacttgaaatagatggcttagctcatcaagatagcgaactgcttgccataggaataactttagaagaaatttttaaggttttaaatcaataaacaaaaccacttaaattactatttttaaaggtttgttcgccttttaatagtaagtttgttttatctaaaaataataagctattttacctattgtagtagcttatttattaaacaatcattacttataagattaaaaattctgtcagttttactattgttaatttaaagaaatataatatttataacttatatatcttattcgtataactataacaatttagattgttaatcaatttttaaattacatattattttaattaataatacttaaatattacataattaaacttatatttaataatactgcaataaaaggctatttaataattttgaaaaattatattttctaagtgataattcatttataaaacaataacttgagtttgtttttttaaagtaaatttatatcgaaaatttagacaaattcgaattacataatttttaaacatagtttatataatatgattaattgacataaatagaaaaaatatatgtcaaagaggtcaatgatatttaattcacttaagaaccataatttgcaccaaattttacgctgtcacgattcattgaataaaaccaagtgaaaagttacgtaaaaaagaaaccaataattttattggcttaaataaaaaatcgaatattacaaataagcggaatgattatggataacgtagctcagctagaaactgatactaatttccaaagccgaaagaaaataacttggggtgtttttagtgtcctgctgttatttttagttgctggcatcttatattatttttttgtataccgattctatcaatctactgataatgcttatgtacaagccgatgtcacttgggtgatgccaaagatttcaggcgaagtgatggagttattaattaacgataatcaggtggtaaaaaaaggggaaactttagcggtattagaccatcgtgactaccaagctcgatatgaccaagcccgttctgtggtcagcctaaaagaagcagcgcttggtgtacaacaacaaaatgaaaagtctgcacggtcgtcaattattgaagcaaatagtggtgtagtggcagcgcaagcagacctagcgcgtttgaaaaaagagttcgagcgttatcaagatctattaaaagatggcgtaattacccgacaaaattttgaagggattcagtctcaatatttaacggctcaggcacagctcagcaaagcgcaagccgccgtaaatgcagcagaagctcagttggggagtttacaagcgagtcgagcgcagcttttagcagatattcaaagtgcccatgcaaatttaaacctgtatcaggtcgatttggcttcatcaaaagtggttagtcctgtaagcggtaaaatcggtagccttgcaatccagaaaggttcacgtgtttctccacaaacccgcttaatggcgatcattcctgaaaatagtttgtatgtacaggcgaacttcaaagaaactcaaattgaaaaaatgcatattggtcagaaagttaaattaaaacttgatgcctatccgagccttaactttaccggaaaaattgagagtttttctcccgcttcaggcgcgactttctcacttatgccaccagacaatgccacaggcaactttaacaaggttgtacagcgtattcctgtacgtatcgccatagattcaagcccacatattgatttgataaaacctggaatgtcggtgagcgccaccgttgacctaagaacttaataataaaattttgggtaatcataaatgaatgagcatgttgaagccgagtggaggtttcccgcaaaaactgcatgggcaatttttgctgccatgatttttggcaacttcatggcgattcttgatattcagatcgtggcaagttctctaaacgaagttcaagctggtatgagtgcaagccgttatgaagtcacttgggtacaaacggtttatttaattgccgagattattgcgattccaatgtcgagtattgtctcgcgagtgctttcaacacgggtgtattacaccatgtgtgcaataggttttacggtcagttctttactttgtgctttgtcatggaacttggaaagtttactggtgttccgtggcattcaaggctttatgggtggcgggatgattccgacttccatgacggcgttgtatttactgtttccagaaccaaaacgctcattacctttggtcatgtttggcatgatcagtactttaggtccagcaattggcccaaccattggcggttggcttaccaataacttctcatggcactggatgttcctgatcaatattattccgggcattatcattgctacggtcatctactcaggtccaaatattgaccgtgccaactattcactcatcaaaagcatggattggtttagcttggtgggtatggcgatgtttttgggtgggcttgaatatttccttgatgaaggcgcacgacatgactggcttgcagacacaggcgttcggattgcttttatggtctgtgttgtaggcggcatgattttcttctctcgaagttttactcagcctaaacctttgctcgatttatcggtatttaaaaataaaaactttaccttaagtgccattacaacgtttgtgattggcatggcgctatatggcttgggttacatgattcctgtctttcttgggcaagtccgtgaaatgaacagtagccaaattggtcacgtcatgatggtgacaggtattgtcatgttctgctttgcgccatttcttgcgtggctcattcccaattttgatacccgcaaaaccgtatttgtcggaatgattctggcgggctttggtgtctggcttaattcacatttgagcattcatagtgattatgactttatgttttggccgcaaatttaccgtggtattggcctcatgatttgcctgattgtggtgtcacatttggctatgagtacattaccactcagtaaagtagccgatgccagtggtatttataacctgatgcgtaatatcggcggcgctgtggggttagcacttatcaattcatccttagattggctgaccgccatgcatgtcacccagattaatcagtcgatgacaccgcaaaactggatatttacagaacggcttgaccagcttacggcgcaatatcaggaagtcggtgcaaatgcccagcaaatcgcgctcagcgtgatctatcgcgatattcactttcaagcactgacatcgagtttcaatgacttattacgcatgctcgcaatcattatgtttgtgaccgcctttttaaccatatttatggatcgggggaagaaaatgaatatgtagtgatttagaaataaaaggcagctttcaaagaatgaaaacaatagggcatatcaaaacatatcccttcatagaaaaagaacattgatatgagtttcgaatatcgctgtacgagataggggaactcacagatctggatgtgggagattaaagtattatgattaatacaacatataaactgatttcaaaattgaacctgaaaaacgcaacttatgggcaatattttgaaaaagagcaaatcgatactgaacgattaaaagtgatgtattccatttacgagcagtattatgaaaataccagattttctattttcgtagatgattttaaaaataaaagcggtgcgatcttaatttttgactcagaaacagatgagattgtcggtttctcgacggtagttgtgcagcatttctacttaaacggtaaagattacaccgtgctctttagcggtgatacggtcattttgaaaaagttttggggcacgcgcacattgcaaagtaccatgctcaaactcatgatcaaacttcgaattaaatatccttttaatgaactttattggcttctcatttctaaaggttataagacttatctcttacttgccaataactactatgtgtattacccaaacattaaagatgaaaaccaacatctttcggaagttgttgaacattactgtgaaaaattctttggcgaatactacgacaaagaagccggcttactcaactttggtgatgactatcaaccattaaaaggcgaagtcgcaccgattactgccgaaatgagagaaaagaacccaaatattcatttctttgagcagaaaaatccaacttggagagccggtacagaactgccatgtattggtcgacttggttggaaagatattgcccgtttccctgtaaaactgatgacgaagccgacaagcaaaggaaaatttgaagcgcagttaagccataaaacaaaacgtagagaggctatccaatgaaatctaatcaatggttgactctcggctcgcatcttattttaaaaaaatggtgtgatgcatctgaccgtaatttccaaaaacagtttaatgctttagagaccacgcaacgtcaaattttgcattcgatattacagacttctacatttgccaaagataagaaagttcaaaactatgagcagtttgtaaaagcatttcctgcaactcgctatagcgcttggcgagaagacattcagcgttaccgtgaacaaaagctttcactctctagcagtaaactggttcgtttccagccgaccagtggttcgagtgaacaaatcaagtttattccatacaccaagctgtttttagatgaacttgaccatgcaattgcaccgtggatggcaagtttataccgcaaatgcctacagttgagttcgggtacacattattggtctgtgtcatggttgcctgaaagtcagcgtgaagttttaaaagacaaaaatctaaatgatgacagtgcgctactcggtataggtaaacgcatactgtctaagtttacccaagcggttccaagtaacgttgcctttgcagcaaatgctgacgatgcactgtttgctaccatttgctatttggtcgcaaaccgtaacttagccatgatgtcggtatggagtccaacttttgcgctgcaattacttgaacgtttggagtctatgcaacaagacgtggttgaggttttgcaaagtggtaaatggggcagtcgtcaggcttccttaaaagaagtcactgcaccgcatagccctgaaagtgctcaagccttaattgcaagttcaaacggcgaacagatcgactttaaaaaactttggccaaagttaagtctagtatcgagttgggatactgcaggttcaaaagcgtgggccgaaaaattaaaagagaaattgcccaatgttcagtttgaaggtaaaggcttatgggcgacggaaggtgtagtcaccattccctataatgaccaatacccattggcttaccaaagtcacttctatgaatttgaatatttagaaggtgagaaacaaggtcaaatcgttccttcatggcaacttaaacaaggtgacgtggtcagcccgctgattacttcgggtaatggcttactgcgttactgtctagatgactgcttaaaagtgactggctttttagagcaaattccgtgttttgagttccaaggccgccgttttggggtcgatctggtcggtgagaagttagcacctgaaaccgctcaacagttgttgtcgcagttaaacgaaacggaatcaaaagcaatttctttactggcgattgatacccaacaacaagttaaaccattttattgcgtgctttttgaaggtgaaattcatcacagcattagcaatgaatatatcgacagtattttacgtcaaaacttccactatgaacttgcacgaaacttagggcagctcgaccagcctcaaattcgccaagccaataatggctggaatgcgtacaaaaaactggtcatgtttgatggcattatcgaaggcaatatcaagcctgaaccactcaaaaaagtcaccctgaatagtttggaacaactatgaaagggatgaagccatttaatacccggtttttaacacttcgacacgccttgtatttaggcgtgttgttggtgtcgaatacacatgccatgactttagatgaggctttgtcagctagtttaaggcatgaaagccagcttgaagtgagccgtttaaatgtgaaccagtccaccgctatgcttgaacaggccaagcaacgtgatggactcaaagtcaatttagtcgggcaacttgactatgaaagaataaatacgccttcacacgtcttgtttccaaccgaaggaaaccgtaaagggcgaagtttgcaattgcaggccgattatccgatttatacctctgggcggcaccgtttagggatagatattgccgaaagtcagctttctgcccaacaccaaggcttatcagatcaaagatcggaaaccattttaaataccgtgatggtctataccgacgtattaaaaaagaaagccattttagaactcagacaaaagactatggcaaatctgcaacggtctttatatgaatcaaagcgccgttttgatgtcggtatgattacccgtgcagacttggctcaggttttagctcaagtcgcacaaggtcaagccgatattacacaggcgcaatctaacttaaccgtaagcgaagcacagttttatcaagtgacaggtataacgcctgacaaccttgttccaatcaatcaattacccactattcccgctaacctagatgaaatattggctcaaaccaagaaccatccggctttaatgcgggctaaatatgaaaagcaagccgccgagaaacaatacgctttaactaaacgcgaactctggccaacggtcatgctgaccagccgtgccggaaagcaagatgaagcgagctatattggctctgaaagtaataactatatggttggggtacagctcaatgtaccgctttatgacgatggtttaaatcgggccaatgttaaaaaagcacaggctgatatcgatttggctgcgcaaaaaattcgaagtcttgagctggacttgaataagcgtacccgtaccacctatgcgcagcttcaaaccattcgacaaaataaagacgcattggcaaatgccatagaggcagcgtctattgcttttgtctatacccgtaaagagttcgatgtcggcaccaaaaccacgtttgatttgctcaataccgagcaaaagctactcgatgcccaaacccaaaaaaccgtaaatgaccaagacgaagtggtgtttgtctatcagctactcgaccaaatgggacgtttaagcaatttggttcctatgcagaccgcacaacaggtgaataatgaataaaacaaatccaccacttactgataatacgcttattacccgtgaagcgactttggcagatgacgaggctttacgagagttaattgcggtaccgatgaccaccaaaggtatacaaatcagctttcagcgtgaaccgagttattttaaggcgtccgacatcgtctatcggcataaactacatgtcgtgattgaagataccgagagtcaaaagaaagtggcctgttatagcaatggttatcgtccgtgttatatcaatcggaacattcaaaacttacgctacgctggggacttacgggtagatcatagctatcgaggtaaatcactggtgaaggtcttaggcaagcatgtaaaacagactatgcatgaaccaaactatagccaaatgattatttttgatgataaccatgccgcacgcgccgctatacaaacgggcaaaacgggaatgcccgattattatgatgaagggcttatagagacactcagtctgacgagcactggcgcaaaacgaaaaatcacggcatttctaaagcagaattctcagcagagtaaccttcaagagatacgtacatgtgtcgctgaagctaaacatgtaccagccatgaaccagtttattagcgacatggcagaacactataactttattccagcctataactttgaagaacttgcccaaggtcatcagtatttttcagggataaaactctcggacttttcactttattttaagggcgaaaagctagtgggcatgtttggcttatgggatcagcatagtattaaacaaaccaagattctaaattacagctcggccatagctgtgcttagacccgtctataacttattgacgccaattaccaaaggcatgcgtttgcctaaactcggtgactctattcagtaccatgtgctacatacgcttatgtgccatcctgaagatttggctttgcatcataaaatgctcgaagatgcctataacaagtcaaaacagcagggcgttggtgtggtgagttttacactttcacataaagacccgcgatatcagttaaaccagttttataaaggtgaacgtttaacgggtatgcatggttttattagctttgaaggtgaccctcggccaagttttgataaaaagctgattccatacttagaggttggacgtatttaacttaaaacttgaagtaattttaatgaagcccacgaaagtgggtttttgttatatttatgcttagtcactaaacatacatataccgccactaccatacaaaccgaaatttaataacatggtagttaagtgatgaaaaaaagtttattgggcggccttattctgtctttgtgtacaactccagcttttgcattaaatattttattggttaacgatgacggcctaaccagcaatatcaaagcactctatgatgaattaaaagcaaatggtcataacgtgcttgtgtctgtaccgtgttcaccacaaagtggtcgtggtggtgcaattgtgatgtacagctcaacaacaattaccgcggataatgataagcaaattgcggctgaaaatggttgccacaatggcgcagcaccaattggcgcacctgcggctggaacctttaccaaagcaggttataccaatggcgactggaactacacgcatggcacaccagtcatggcaacagtttatggactagatgtagttgcaccaaaacgctggggtaaagcaccagacctagttttatctggcccgaatgaaggccaaaatgtcggcaaagtcgttgtacactctggtacgattggcaatgtacagttttcggcaggacgcgggattccgtctattgcattaagcgccgataccaacacggtagatgacaaaactttaaacaaccctaactctgcgattgtggcaaagcaaactgtagtgttattaaaagaattacaagctaaggcaggcaagggccaattgttgccaaaaggcattaccctcaatgtgaattttcctaaaaatttaacaaccagcacgccgtttgcattttcaaaaattgggacttatgacttatataagctgaaattccaagtgactaaagacaataaaggcaacaatcaatttggcttaggaatcgatgcggcaccatcggccccaactgcctctcaaatgtcggatgaaagcgctgtaatgcaaagcaaaattgctgtgactgcaatgcaagttgcttatgaccaacgaccagcaggtcaagaatggcttaaaatccgtttaaaaagcttatttaacaagtaaggagcaagaccatgaaacgttgtttattggttttactccttgggcttggattggcggcttgtaatgacaatgatcatgatgaccaagtctcgactgaaaaacctgtactaacgccgagcttagacgtcggaacttatattattagtaccgaaactgatcaagaattacctatggcgggtaaatactattctggtgcagatgggactaaattattggttttagatgatgacgaaaaccgtgccaagattgtgatgagctatgatacaaaaaccaaagcttggcgaagcaaccagtctaatcaagcgatgacagtcgaattagcacattatgaaaaaattgctgatcaaaaacttttgcttaatcaactggtcggcacctacgatttatcgtttccagatggaacgacggtaaatgccgaggttagtgcacaaggtaaaattgtctcgaaagacccgaattgtgtgtttacaggtgttattactgaaactgccttagccaatacagcaaactatcaacttaccgataataagtgtgatgcgctaaaaaataactcgaaaggttatgttgtggtagatgaagacctagaacctatgagttttagacttgtatctgacacgattgcatcaaaagacatttgggcatttgcacaatcttaaaaataaaaagacaacggatttatttcgttgtcttttatctcaacttatcttgcgccgttgaaacaattaacatggtttgaaggtaataatcgacacgtgattgattactttctttatgtgagttgtgcgcattaaaggctgcatcatgaagtttcacgactcgagcgatcggatttgaactacaacgaattaaatattcttcgcgtgtttcagtttctcgtttagttaatgcatcaaccgcatcacgaacttcttttccaaataagctttcgattttggctagggtaagaggggtgtcttcaacactatcgtggagaagggctgtaataatatagacttctgaaaattggtgctcaattaatgagttgaccacacctttaatatggtaatcaaagtaatcatgaggaccatacttctgaccttgatgcgattcttttgacaatttctctgccaattcaactttattttgagtcattttttgctcttattaatttaagtatataacgcaacctaatttgtgagatgggtcgcttaagtcataattttatactggataagctactttgttgtgaatactctcgtttgtttggtgaatctccacaatgtaatattcaacatatgaaaacggataaataaattattgctatctataaatatgagatgcgcaaaaatttgctcacttttatctaaaataaatcaaattgagcaaatatattcacaaaaagtcttttttatcgtatttttgagaaaataattactcatttatacgaatgaaaaaattaacaatacaaacccaagaccgtcagcagattcttatagatttatataaacaatatttgttgagtgagattactttggggcaattgctatcgtatttacgcaaaaatgtgttgggtttatcgcaagaacaatatgctaatttggtgggtataagccgtcggactttaacggacattgagcaggataaaggtaaactcactcagtctgtgttagataaagtgtttaaaccacttggtttaaaagcagggcttgtacctacgcatgaacatattgttagcaaaattataaagccaaacgagtaagaaactatttaaatgttcacaagggaacgcttgtgaacactaaaatgataatttttgaaccaatctaatatataaatttttgcaactttaaaatttaacttaatgatataaaagcagattgtaaatattacttaagaatatccttaattatgtaattaaatgaaaaataataattatttaaatattttctagccaatttcacattgacacttcaaatattgaagattaccatttgcgggctggcctacattgccagtcggttttagcagaccgttcactccgcatcagaatttattccttctgaggaatagttttgtgtgtaaactcccagttccctcccgtagcggtaggacgggagagggacacctacgggtgtgctagttgagtgactagtctgctaaccctctttcgttctgccaccataaatcttatgctctggcagaactccataaataaggagttggctttgcgcatccatcatttcttggcaacccttgccaaaagctataacaacacagcttaaaacatttaacgcagcttgatcgccgtaaggctttttcaggctttagctcgttattacttaaaacttcgaacaactaaaacttgagatgtgctgggcacagtctttacggctttgctatgcctttttttctcccaaaaaagtcagcagttttttatatctcatttatatacaacaaaaatttaatttataacggtaaaaatatgccaaatttagttctcccaacacgtgcattaaaagttgtaaatacatcaattgaattatttcaccgccgcggttttcatattgtgggcgtcgaccgacttgtgaaagagtccgaaattaccaaagcaactttttataactactttcactctaaagaacggctaattgaaatctgcctaatggtgcaaaaagaacgactgcaagaaaaagtggttgctatggtcgaatacgatcacgacacaaacgcaatcgataaactcaagaaactctatattctacataccgatgtagacgggctgtattacctgttatttaaagccatttttgaaatcaaaaatacctacccaaatgcatatacaaccgccgtgagatatagaacatggctaatcaatgaaatctataatcagcttagagtacttaaacccgatgcttcctttactgatgccaaattatttttatatatgatcgaaggcgccattattcagcgtttaagctcggatgaggttgatgaaagaatggttgaggtgtttttgagggggatgtcggcaactaagatttaagctgaagagtagcttttagatatttttgatataacactgtataaaacttaaaacggtagaaagactaagttctctgattagcaagctctacttagaagcccaaataatacagtaacttatggtttatcccacaaacaccccaagctggggtatatttaattaaatgctttatgataaataggggatgtaatgtatagtaaaaacaatgtcttgcttccaagcaaatcagcatattcattagaagaagcatgtaaagaattgaatttatttttcaatcgagatgatatagatattagatatatattagatttagttcatcaagggcatatttggatgcatgcaaaatttagtaagaataattatctttttgccatccctatggaatgggagttagatgaaaattttaataatgaaaatgaaaagagaatagaagaaatacttttttttaatagaatgcttaattatcaaaatatttataataaaatgggggattatgatctatatcttaagttaactttagagacagcattcgatttgcttaataataaaattattataaaaccattaatattagatatttatgatccgtgtgaatatttttacctttgtgataattatcttaaaattgattccggatattatttggaatttaaaaaatatcctaaagggcttaaaagagatgagtattttgatacggttcttataaatcattcagaaaaagaaattattaaaaaaatgtctttttttgagatatatgatgaaatttataatggtacagaatttgccgatctatactacgagtttcctgaggtaatggagattgtagaaatacaaaataggcacgcaactgatagaatagataaatttaagtggaaaaaaggatgggagaagtattactggtacggcgataaacagttagaggattttgaaatggaatataatttagaagatatttatattctaaaagaagacatggattttttaaaaagaggtgaaagtagaaaaattagggaaaggaaagattatatgtcacctcatattagaaaacagtatgaaaaattagatgtaagatcaaattatactagtaaaaatagcatttctaataaatcaataaataaaattatctatgctttggctaatatggcaaatatagacatctcccaacctcaagctgctttttctcaactacaattatattgtgaaaaaaataacttggagttaccaaataaggatacatgtggcaaggcttttaaagatgctaagtactattttgataattttaattctaaatagactctaaatagaacaatgctaaaaagactttacacatactagcctcatccccacgatgaggcttttttatgagtattacagttttaaaaaatgattcattaataaattacttttctgatgacgcggtagcaacagggcaaattcaactgaccgatccaatgcaattactagcagatccaaatcttttacgtaatgctttactgacttattcagaaaaagtgattgagctagagcacaaagttgaagttatgcaacctacaatggaagcatttgcccgtattgctagagccgagggaagtatgtgcctaactgatgctgctaaagctctacaacaagaaccacataaatttaataagtggcttcacatgaatgactggatttacaaacgtcatggcagcaaacattgggttgcttatcaagagaaaattaaagcgggatatttagaacataaagtaaaggatatccagctgcctgatgggacgatcaaaatcacagagcaggtgagagtaacaccaaagggtttaaccaagctttcaaagcttctaggaaacaataatgcataatttaggcaataaaaaagcccttcagagaattcttggcggaatcaaagagctttggattgctaacacaaggagtattaacactgaacagtatcgtataagggtttgggaaaaatcaagtctacgatattaatgatgttgctgagggttaaggtttactaacgaaatatatagccagcttagagtgtttaaatcagatgcttctatttacgttaaagcaatttaaaaagccctgaatattcggggcttttcatttaaatttactttaatgattctggtacataatttggtgaatcagtaccataaaatgactcaatatcggcatcatacaaagacttatatttatcttttgatgcgacatctttagtttcatcaataaatttctgtatttttgctttatagtcagtgtgaccagctttatacatttcagttaaatatacaaattcggcgtctctgtactggggatcatttttgctagatgatttactcaattcggtttgtatgagttgggcagaagcttcgtgacactgttgaatttttactttggcctcatttaatttttcaagcaaagtacatctaaacattatccgttgaggcaagggtttctctttgatttgttgctcatttaactcataagcctctttatacataccagacagcatataaatattcatcaatgccatttctctttgttttttagcagtaactttcttaatttcaggtattaaaggcgctaaagtttgttttatcttttcatcttcaccagcagtcacaacttcatttgtgattgtttcatatctatctaaaatcgctttatcacttgcggataattccgtttttacgttttgagagctgcttttctcagtagtatctacctttgcttgttcatttgatgccttgctacaagcagtaactccaaatacagaaatgagaacaatagtactgattaattttctattcatgatttacgtcttgatgctgaatttaaagtaaaagagaagcgagtgtgaggtgggtttggtcgaacagtaccgccatcaaattttgcggtgtaacccatagttaaagttgcttcaatagttgataaatcaggtttaggtagagttaccttacactgacctacaggctccttagagttttctgttgaccatacgccttttcccttttccaaacgtgtttttcctaagctttgattgttatgcacaagatcaagtgttgcgtatggaaaaattgtagcatcaccgcttaatgttggaggaagcatagaaactgtcacgaaaagttcttgcccttttagaatataagtaactatgaaagtacatacacctgaaacagcctgactaattgccccaaaaagatttttcttatcttcatcgtacgggaaaataccatttgtaaattttacatatttcgttgtgttttgctcgatgtagtagttctcatattcatctttaacaaaactgtctgtggctggttgcttctgtgaaattggagctgatgaagattttgcagccgatgatgcagcgccaccaccgttatcctgaacaactaagttttgttgaggcagtaatttacaaccacaagagagtgaatcatttactcgggcagcagctttcccaaagatttgcatgcacggatcgccagatacaatagttgcaacgactttatgagttggacaagttgctttgtcaccaacacaggcaacgggaattccgtcaatcaggaacatattattcccagaaattacttggccaccaccagaggtcgggcagcctatagttatatatggtgttgtcaaaactattccttcttattttcttgaagtgccagaatgatagcaaagaggggtagacagtgctgtatagttttatttatcaggatgcacagcccatacgatcaataataatatgatttaaaaagataggcataggttctttaaaataaatttttatgtcattctctttagagattaaatgtttattcgagtaactttatgaggatggtcgttaaaaatgaagtctttccttatatatgattcattgataaaaagatatgttttattaactgtagggctaattgttattgcctttatgatagctatcttttttaaaggggaacttgaaattgattttgcgattggggctgtttgcggctatttaaatatttttctattgttaaagaattatagatttccacttattcccgaagttaaagaagatagtgatgaccttgttatgtatacaagggttagtcttcttattttttttgttttgatagagtttggttttttacttgccgcattattttaaatttttatgaatgtatgattaagaatgaattagaaatgattagagttttgctgctaattaaataaacacggatatatcaaaacatccgtgttttaaaagatttaaaatgaattatggtttttctctgccaattgcatggtctgtttaagctgtttacggttgaaacctaaaaactcaatcacatttctaaacagtgcgggtgctttggcaatcggagtatttattttaggtacaacagtcatatctttacgccgttctatactttcaactacacccgagacaacttcatcaatagttatatatttccaaatacccgagttacctttccacacagctttacctgctgggtcattttgaatactgtccatcattggggtcttaaagaaggtcggatgaaggctaccaacatctatatttgaatattttaattctaagcggagactgtcacaaagtgcccaaacgccggctttactcgaagtgtagtgagtgtttaatggggagtggacgaaagccgccattgaagacactgccagtaaatatccttgtgtttgttttacatagggtatagctgcgcggaaagtacgaaatactccagtcaggttaatatcgatggttcgctcaaaggtttcaggagccatatgttctagtgcttctgttgtagctatgccagcatttgcaatcaccacgtcaattttaccgaagtgttgagctgcatttgccatagccatttctaggctttccaaagagcgtacatcggccacccaacctgcggcaatgctttgcccacctagctgttttgcctgactttcaactttgttaaggtctaaatctaggagtgctagttttgcgcctttggcttgtaatgcttgggcaatcgcaagtcctagtccacctgttgaacctgtaattacgacaactttatcttttaatttgtatttagacatatcagatttccagacatttttataaatgagctttaaggcaatggattatttctggacaggtttagattcactttcaagttgttgaagtaatccctgtaatttcttatggcgtacaaccattgcatcactagctgcattaaacattccgcgtaatatcgagaacggaacccagcgcactggagcaaaaatgcgtggctgtcgacgctgtacaccttttacaatggcttgcgccatatattccggagaaataggcttgcgtaaccatgccggaaatgctgcttcaatcatcttcgttacagttgcattacccccaaaggcaaccttagcgattggtgttgctgtccagcccggatagacaacactagcggttgcgccagtatatgcaatctctgtacggagacagcgtccgagcatttctactgccgcctttgaagccgcatatggagcgtttgccattccgttgacaaagcaataaacagaagaggttatgaggatttgtcctttgttgcgggtcacctctggtaaggcagcacggactgtgcgccagacaccaagtaaatcaacttcaataatcttatcgaactcagcttcatcacagctagcaattgtcgaagcaccatcacgccatgagatacctgcattggcgaaagctatatcaaggtgtccaaagtgttttattgttttctggactacatcttttgtggctaccgcatcagtaacgtctagcgctaatggtaaaacacgagatgcctcaaattcagatgcaagtttatctacagcttcctgttgcatatcggtgagtaccaagtttgcacctaatgcataaaattcacgggctgttgctgcaccaattcctccagcggctcctgtaattaaaacaacttttttgttcaggtcatatttcatggactttctccaaatgttttaaatttactgttacttgactggaacgatgcgtttaagaaagtcgatctgatcacgaacaacacgctcaaaagcttctccaacgtaaatttcaaaatgaccatcggcgtagtgcttaatttcatgattgggtgtatggctcgcatgacgcaatgttgtttttgagggggcaacagagtcggtatcacagacacaaaacaacacgggcgcttgaatacgtgatgtcttacgacccgggtaatagcgtatgatgtcgagtacaaaacgtgcagcgacatagtttggaatatttgaacctgaaggcatgagtgcgagataacctgaataagcatcaggtgcattcattaatgctgtatgtcctgatggtgctgcaagaggtaccatgactggcttggcgccgagtattgatccaatcttgtcttttaaagcgagtcccatgagcttgagggtcgttatcgggttcattgccatgctagatgagaaaccatcagtgaaggggcattgtgatataacagcagcaagccggttatcattggcagctgttgccagcacatggcctccaccgaaagaagtcccccatataactacgcggtttgggtcaattttgtctaggctacgtgcataggcaatggcagctttccagtcttcgagctgactttttatatctagtaattgtcgaggttgaccttcgctatccccaaaatagcgataatcaaacactaaacaagcataaccctctgccacgaaacgttcggcaaaagctgttaaacgcattcttcgagtaccacccagcccatgtgccatcacaatcattggagtagctacctcggttgtgggacggtataaataggcactgcatttcacgtcatttgaatcaaactgaacatcaagtggcgcttggggcacattatttagacttttacccatcgtatttttctcaatattggctataacactatcttctgaaaaataatgagattgggcttgatgaaagctgccatattgcttgacactttgcgccaaaatttggattgagcaggtatttttagttatttgcttttgcttgaaagctttaagtacactaattgataatgggcgccaaattagaactatacggaatgaatggattgaataagccgttgtatagaagaaggatttctgaaatctatgttcagttattatttgaatatctggaaaaactaggacatgacccagaaaaggtgctgggtgaaccgtggcctaaagcagattcaaatcatttagaaggcgtagatatcgaccattgggaaagtcttctcattattgctaaagattatttaaatgaccctttcattggtttacatgtggggcaaaccattacagctcagcatctgggtgtattagggtcagtatttcttgcttgtgaaaatctgggggcggttttagaaaggtttgaacgatatcagcggcttgtctatgatgtttatcctgccactgttcgtatttatactgaatatgtagagctttcatgggatacaaaaggtgagcaagtcggccctttatcggatgaaactggccgtaccgttatagttcaattttgccgtagtctcattagaggaaaagaaagacttaaagaaatacattttattcatgaacggcctgaaaatgttcagccttatgaggagtattttggttgtcctgtgctttttgaacagcctgtggcactgatgcgttttgataaggaaatcttaagtctaccgcttaaaaactccgacgcggccttagttgccatactagaaaaacatgctgacaagttactggcaagcctgccacatattgatgaaattacagatcaagttcgtaaacaaattgcttacttacttcatcaaggcgaaccaactattgaacagcttgcagagcgattaaattattcacgtagaaccttgcaacgtcgtttaaccgaggcaggtacgaattttcggaaagaattaaatactgtccgttacgaattagcaaaatcgtatttaaaagatctaaggctacaaattgtagaaatagctttactgttaggttatgccgaacacagcccatttacacgggcttataaagagtggtcgggtaaaacaccacaacaagctagagaagaaatgaatgagttaaggtagaacttatactataggttctaccttttaagtctatacaaatgctttaaaaaagatatgcagatgttttgagtgttcattcatcgtttaatgcacattcaaaattacttgggttttctttacatcttacttttttcaaaaagttcatcatttttgggtcgtagatacctgctttggttagctgtatacgagcctcgcgcatcattttcatatagtttaattgttcatttttaggaatatccatccaatattttgaaggaatatcactttcatatttggcaataataccaaatgttctattgagttggctggctacccaagttcgagacttttgcccaaaacccgcagggaattggtctttacgaataatgaagtttgctgaaatttgagtcagagggaaacgaacaattgctcctttctcacctaaacctttgtagagttcaaaaggtttaaacgccacaataggagcgggcacaatatcaatttcatggttattaaattttgcaccggcattggtaacgtctaccgatacagcctgaccaccgacatgttgaacaagctttggctgggcttcatcgtatttaaataccccaatttttttaccggcagctttagcgagagtatttatacttctatcatttacaaataaataggcaggaccaattgtgcctaaacctgcaatttcataaggacctaccaccatgttttttgcggccattggtgaggacaacagcttataggcattaattgccgttttcatatttgttaatgcaccaacagcatctaaagagcctgtatatttattaaactgacggccacgtaaaccgctaataatagcgccatcacattttccaactttcaaatcttcagcagctacacgttcatcaacatatgcttttaaagatagatcagctccccaatttttggcttcaagtgcataatctttggctaaagcgaaagcgtctcccgatttaccaatggggtcaaatacacagacgacttgttgtttggcataaagagttgtggttaaacatgtacttgtaataagtaaaatagctttaaaacgatccatatctagttatccattatttaaattataaaaattattttataaatcttggttaggttagatatggcatttcaataaaaattttaagtgaaaaagtcaaaagacagcttgggatcaggaagtcatttagttattcatagaaatttttatggtgaaaatacttttcgagccttgattgctatattgaatagtgcctttcagtgccacaataattgcatgtacaacagcaagacctaaacctgtgccgccaaattctttattccttgattcttctaatctaaagaaaggcttaaataaatcgtcttggaactcggttgcaatgccggggccttcatcctcaatttttaatatccagttttgtgataccacttccgaggaaattttaagtttgcctgcatgtgaatagcgtatagcattatcaattaaagcaattaaaacttgctcaatacgacggcggtcgcaatatacaggagtggaagttaggtcaagttctggtactagcttagcttgatccaaacgatcttcaaatgctttaagaactttttcaactaccgccttaaagtcaaacaattcataatttaaccggagttgctggttctctactaagcttaaagtccgtaagtcttcgactaagtgagataaaacttcaacttgatttaaaaggcttttaaataggacttcatcaggtttaaaaacaccgtcgatgatgccttgtaaacgaccttgtaatatcgttataggcgttcttaactcatgtgcgatggctgcattccaaacctgcgcatttttaacagaaacctctagcttttgagccatatcattaaaattatataaaagctccgacatttcggcggagtgaattctattatcgtaagctctagcagagaggtcgccgtgactaattttttttgctgcttcggctaagaagttaattggcacaataaaacgctttgcgaggcgcatgccaatcactaatgaaataatacagccgcaaaagataacagtggctaaccaaatccagtctacaaaatgaaaactggtccaatcttcttgttgaaatgagcttaaactaatccagcctttttcaatcgcatagttataaatgacataacccagtactacagaaaatagcgtaacgcttaaatttacaatagttaaggcaataaaaagttgcttactaattcctaacttacttttcataaaatattccctagctattttttaatattatttaggcgtcatcttttacagctaggggattatctagcctatatcccacgccacgcacattaattaacatttgaaatatgccttgttcttctagtttttttctcagcttacttacatggctatctacggttcgctctagtgcatcgctatcattcatgcagtgattcataagttctccgcgcgtaaaaactttatgaggttggtcaatcatgaatgaaataattttatattcagtcagcgtcagattaagcaagatcttcttattctcagagtgtatataaacgctatgagtgtcggtatcaatttcaatatttttatagagtttatttttattagttactttgtttgcaaactgagtacgtcttaagactgcctgaactctagcgatgacttcatttgggttaaaaggcttcaccacaaagtcatctgcacctatgcgtaatgccataactttatcaatatcttgatctagcgccgtcaacatgatcacgggagtctgagctttttggcgtattttatttaatacttcccaaccgtttaattcgggtaatttaatatcaagtaaaattaaatcgatgggttggctcgcatgcaattcaatcgcttgttttccattcatagcccgaataacactcatgccttcacgttttaaataattttcaataatgtcgccaatatcgtagtcatcttctaccacaagaataactttatcttggcaatcaaaagaaaaagaatgatcaaacatagaaaatctggctatagaaagtgcttcaactcatcatacgctaaattatccgtatttctccacacttactccacactttagtgattatccctacacactcatcaaaaataatacgaacatcaaaaactcactaggtttggacagtatgcaaaagcatcttttacttcctttatttttatctattgggctgatattacaggggtgtgattcaaaagaagtcgctcaagctgagccaccaccggctaaagtcagtgtattaagcattcaaccgcaatcggtaaattttagtgaaaatcttcctgcacgtgtacatgcattccgtacggcggaaatccgtccgcaagtcggaggtatcattgaaaaggttctatttaaacaaggtagtgaagttagagcagggcaagccttatataaaattaattccgagacttttgaggccgatgtaaatagcaatagagcttctctcaataaagctgaagctgaggtggcaagactcaaagttcagttagaacgttatgagcagttattaccaagtaatgcaattagtaagcaagaagtaagtaatgctcaagctcagtatcgtcaggctctagccgatgtcgctcaaatgaaagcattgctggccagacaaaacttgaatctgcaatatgcaacagttcgagcgcctatttctgggcgtattgggcaatcttttgtcactgaaggtgcattggtcggtcagggcgataccaatacgatggcaaccattcaacagattgataaagtctatgttgatgtaaagcaatcggttagtgagtatgaacgcctacaggctgcgctacaaagcggcgaattatcagcaaatagtgacaaaaccgttcgtattaccaatagccacggacagccctataacgtcacagcaaaaatgttgtttgaagatattaatgttgacccggaaacaggcgatgtcacattccgtattgaagttaataacactgaacgaaaattacttccgggcatgtatgtgcgtgtcaatattgatcgtgcttctattcctcaagcgctattggttccggcgcaagcgatccaacgtaatatcagtggcgagcctcaggtatatgtcattaacgcccaagggacagcggaaattcgtcctatcgaaattggacagcaatatgagcagttctatatcgctaacaaaggcttgaaagtcggtgacagagtcgttgttgaaggtattgaacgtattaagccaaatcaaaaattggcattggcagcatggaaagcaccagccgtcgcgaatcatgcttcaagtgtagaaaccaaaacttctatagctgaaggggcacaaccatgatgtcacaattttttattcgtcgtcccgtttttgcttgggttattgcgatcttcattattatatttggattgctgagcattcctaaactgccaattgcacgttttccaagtgtggccccgccacaggtgaatattagtgcgacttatcctggtgctacagctaaaaccattaacgatagcgttgtaaccttaattgagcgcgaattatcgggtgtaaaaaatctactctactatagtgcgacaacagatacctccggtacagcagagattacggctacgtttaaaccaggcacagatgtggaaatggctcaggttgacgttcaaaataaaatcaaggctgtagaagctcgcttaccgcaagttgtacgtcagcaaggtttacaggttgaggcttcatcgtccggatttttaatgctggtcgggattaactctccaaataatcaatattccgaagttgatttgagtgattatttggttcgaaatgttgtagaagagctaaaacgtgtcgaaggtgtagggaaggttcaatctttcggtgccgagaaagctatgcgtatttgggtcgacccgaataagcttgtttcttacggtttatcgattagtgatgtgaataatgccattcgtgaaaataatgtcgaaattgcacccggccgacttggtgatttaccagctgaaaaaggccagctcattactattccattgtctgctcaagggcaattgtctagtctcgagcaatttaaaaatattagcttaaaaagtaaaactaacggtagcgtaattaagttatctgatgttgccaatgtagaaataggctcacaggcatataactttgccattttggaaaatggtaagcctgctaccgcggcagcaattcaattaagcccgggtgctaacgccgtgaaaactgccgaagttgttcgagcaaaaattgaagagttgaagctaaatttaccggaaggcatggagtttagtattccttacgacaccgcgccgtttgtcaaaatttcaattgaaaaggtaattcatacattacttgaagccatggttctggttttcattgtgatgtatctatttttacataatgtccgctatacgcttattccagcgattgtggcgcctattgccttactcggtacttttaccgtgatgttgcttgccggcttttcaattaacgtactcaccatgttcggtatggtgcttgccatcgggattattgtcgacgatgccattgtcgtggttgaaaacgtcgaaaggattatggcgacagaaggattatcgcctaaagatgcaacctctaaagcaatgaaagagattaccagcccgattattggtattacgctggtattggcggcagtatttttacctatggcatttgcgagtggttctgtaggggtaatctataaacagtttaccttgaccatgtcggtatctattttattttcagcgctattggcacttattttaacaccggcactttgtgccacgattttaaaaccaatcgatgggcatcaccagaagaagggcttctttgcatggtttgaccgtagtttcgataaagtcactaaaaagtatgaattgatgctgcttaaaatcatcaaacatacagttccaatgatggtgatctttttagtaattaccggtattacctttaccggaatgaaatattggccaacagcatttatgccagaggaagatcaaggttggttcatgacttcgttccagctaccttcagatgcaaccgctgagcgtactcggaatgtagtcaatcaatttgaaaataatttgaaagacaatcccgatgtaaaaagtaataccaccattttgggatggggttttagtggcgcaggacaaaatgtagctgtggcttttacgacacttaaagacttcaaagagcggactagctctgcatctaagatgacaagcgacgttaattcttctatggcgaacagtacggaaggcgagactatggccgtattaccacccgctattgatgagttaggtactttttcaggtttcagtttacgtttacaagaccgcgctaacttaggtatgcctgctttactggctgctcaagatgaacttatggcaatggcagccaagaataaaaagttctatatggtttggaatgaagggttgccacaaggtgacaatatttctttaaaaattgaccgtgaaaagcttagtgcatttggtgttaagttttctgatgtttcagacatcatttctacatcaatgggttcaatgtatatcaatgacttccctaatcaaggacgtatgcaacaagtcattgtacaagttgaggctaaatcacgtatgcaattgaaagatatcttgaatctgaaagtcatgggttcaagcggtcaattagtctcgttatcagaagttgtaacgccacaatggaataaggcaccacaacaatataatcgttataacggacgaccatctttgagtattgctggtattcctaacttcgatacgtcatcgggtgaagcaatgcgtgaaatggaacaactgattgcgaaattaccgaaaggtattggctacgagtggacaggtatttccttacaggaaaagcagtctgaatcacaaatggcctttttacttggtttatccatgttagttgtcttccttgtcttggctgcactctatgaaagctgggcaattccactttctgtgatgctagttgtgccactcggtatttttggagcaatcattgccattatgtctagggggttaatgaatgatgtgttcttcaaaatcgggctaattaccattattggtctatcggcaaagaatgcgattttgattgttgaatttgcgaaaatgctgaaagaagaaggcatgagtttgattgaagccactgttgccgcagccaaacttcgcttacggccaattctgatgacatcacttgcatttacgtgtggtgtaattcctttggtgattgcctcaggtgcaagttcagaaactcaacatgctttaggcacaggggtttttggcggcatgatttcagccaccattctggctattttctttgttcccgtgttttttatcttcattttgggtgcagtagaaaagctattttcctctaagaaaaaaatctcatcttaagttcaatgcatcaggggaaataccaatttcctctgatgcttcatatgctcaaaatttactttatttggagaatactatgtctaaatcgacaatcgtatctcgtggactcattctttctacactctcaattgcactcgttgcatgtgtcaatatgcaagcgccacagcctgcaattacatctcatattcctcaaaattttagtcaaaatcattctggaaaaatgattgcagaaaaaagttataaagaatttatttctgatccgaaattattacaggtcattgaaatcagtttaaataacaaccgtgatttacggactgctacgcttaatattgaacgtgtacagcaagaataccaaatcacaaaaaatagccagctcccaaccattggtgtaacgggaaatgcagtgcggcaggttagcccatcgattaaccccaataacccagtttctacatttcaagttggcttgggaatgactgcctatgagctagatttttggggccgtgttcaaaatttaaaagatgctgcattaaataactatcttgcaactcaaagtgcaaaagaagctgtacaaattggtttaatcagtaatattacacaggtctggttaaattatgcttttgcacaagcaaatttaaaccttgccgagcaaaccttaaaagcacaagtcgatgcttataaccttaacaagaagcgctttgatgttggtattgatagtgaagtgccattaaaacaagcacaaatttcggtagagactgctcgaaatgatgttgcaacttataaaactcaaattcaacaggcaaaaaatttactggatttgttagcaggtcatcctgttccgcaaaatttacttccggatcatgctattcaaaatattacctttgagaaaaactttgcagccggtttaccaagtgatttattaaatcatcgtccagaccttaaagctgccgaatatgagttacgtgttgcaggagcaaatattggtgctgctaaagcacggatgttcccaaccataagcttgacaggctcgacgggttatgcatcatctgaactgaaagatttatttaaaacaggcaattttgcatggtcgattggacctaatatcgatctaccaatttttgattggggaacaagaaaaactaatattaaaattgcggaaactgaccagaaaattgctttagctaaatatgaaaaagccattcaatcagcttttcgtgaagttaatgatgcacttgctacacatgcacatattggtgaacgattagacgctcagcgtcgcttagtctctgcgactgctgcaacctataaactctcaatggcacgttacaaagctggagtggatagttattttacggttttagatgctcagcgttctgcttatgctgcacaacaaggcttacttgcacttgaacaaataaaattaaataaccaaattgaaatttataaagttttaggaggaggaatatcaaaagtctaataaagtttcactcttaaaaaaataagctgatagaggtattccaaatcagcttatttttgctttagatggtctaatattgctatgaaatcaggttatctaacacggggacgagctaaggcttgggttaaaaaattaatttggtcctctaaaatttttatttgccacggttcattataaaaatcaaaatgatcaatcggatattcaagtaatttaacttctccatttgctaagcttgccgacttgcgagcagcttcaggaggagtaacttgatcatttgaacccacttgtaccaataaaggacactttatttgatgggcgaaattaatgggccggtttcttgcaacctctaaagcagttcgtgcacatacttcattccgccatgttggcccagccatggctttataggaaacctccgagccaggtgtactaatgatggccgccgtgcccggttgccccacgattggaataagatgcgctttttggcctaaaagagaataagctaaatcttttagtccatgagcgactgcaacggttaattgttttagaccaccataacggcagatttgtgagagggcagctaaaccatccgtagccgggttcatagagattactgcagatattttctgatcttgggccgcagcgactaaaacatgccctccagaataagatgtcccccaaagcgctatacggtttcgatcaatatttggcaaacttcgtactgctgcgattgctgcatggtaatcttcacgctgatttttataggaaacattctgtcttggaaaaccaccagattctccaaaaccacgataatcaaatataaatgtatcaaaacccgctttactcaatggttctgcgaaatttaataaaccggtatctttggtccctccgaagccatttgccatgactacacagggccgcccacgagagttcatatacttatctgttgtggcaggaatataccatgccgagcatgtaatccctttactgataaatttaatattttccataatattgtgctcatgtatttagtcccttatttaggctccagatccgataaataagagactaaaatgctgattaaaggagattaagctttgaccatcaattcttctgaagatgtttccgtaacgacagttaactttttcttgggaaccaatgcagtgaactttaattccttatcacacacaggacctttattgagccgctcaaagtcaaccttataatcatgttgtagtgtccaaggaccttcggttcctgccattgggaattgtgccaaaccacgttgaacataacctgggctcaaatcaacaaaaggaacccgtttcatggttttattatgaataatcggtgtaaatgttccgtatttattctcatccatatagtcaaggagacgacagaaatgttgccataccagatctacttttaaggtccatgcaatattggtataaccaaatgcaaaggcaaaattaggtatatctgacagcatcatagatttaaatatcgtcgtgtctggataattaattttcttaccgtcaacggtgagttgaatcttactaaatgccagcatatttaagccggttgcggtaataataatatctgcttctagtacttttcctgacttcagcaatatgccttctttgataaaacggtcaatatgatcagtcactactgatgctttaccagatgaaatcgctttaaacatatctccatctggtaccacacacaaacgctcatcccaaggattatatttgggtgagaaatgcgttgatacatcaaaatctttaggtaatctgcgccgtacatctgcaatgagtagatgacgcattacctttggaaagcggtggcatagtttgtaaatcccgcggctaatagcaatatttttacgtcgtataatttcatacgctcgttgcggtgataaaactgtatttaaagcaactgcaataggatcgacactcggcatagcaactacatagccaggtgatctttgaagcatagtaatatgctcaacgtcttttgccatagctggaattaatgtcactgctgtagcaccactaccaatgacgactacttttttacctgaatagtttagattttccggccaatgttgtgggtggacaatttgtcctttgaattcttctgtgcccttaaagtcaggggtatatccattgttatagtcataataacctgtacccatgagtaagaagcgagaacgtaaggtaactaaacttttttgatctttctgtttgactttaacggtccagattccttcattcgatgagaattctgcactggttacatagctgccaaattgaatatattggtcaataccattttctgtaacagtttcatgcaaataatcacagatcatttgtgcgctaccgaaagtctttttttgcgtccatggtttaaaaccaaaggcaaaagactgcatatctgaatctgagcgaatccctggatagcgaaatagactccaagtcccgccaatatcatcacgaccttcaagaataataaaggttgaattaggtctatatttctttaaatggtaggctgcgctgataccagcaatcccagcgccaataataagaacttctgcatccaaagattgagtaaaatccgtttttctattcatgatattcaccctgctaatttttgagctaatgcatgtgtgatgcttgcagcagtttcaataccagactctagagcaccttcgataccgcccatgctcattgttgcaatatctcctcctgcgaaatagatattcccatgaggtttacgcatgagcggagctgcatcggacaaatgcccagggcgatagtgtacccatgtgccttgtgcataagggtctttagcccagttatgtgatgcgatatcaagcacttcaatgtcaggcttaaacatctgtaaagctttttgaacagcttcaatatcgttcacatctatagttgactcgtcagaaataaaacagactaaaattgagtcatcttcatgttcatattcaactcgaacggtattgattgggttttgctcaactggcgcaaatccaataaatggctcgatttttccacgtacacgtgcccataatttagcagtacgcattggatgttttgcaacaatcatatctcgagcaggtttattaacctctggtgtaattttgatgtcagataaaacatttaatggaacagcaacgagggctttttttgtcacaatcttttcaccagattgagtcgtaataacaacctgctcaccttgatcatcaatggctgcaactgaagttgtaagtcgtaattcagcacctgaatcattataaatagctcttacgagtttttgtgttccaccggcaattggccaagaccctgctacttcaaagaacgcaccccaatttccaaaataggtagctgcccagaataagagctgtgcgactccttgctcatcccaagagtgaacaagtgttgataataggccgtctaaaacgtcacgttcataagttgataaatttaaggtatcaagacgatctcttaatgtttgtttttcaatatcactcgtatcgatagcatttacatcataaggaagaggaaaccactgacgagcgtcattaaagaaagctgttaataatggttcagcaatagcagcatattcagcttgagttcccgtgtgtagtttcccgtctgcaaaccaaaccgttttatcaacttctgtaggaggatttaagccaattccgtagcgttgtagttctctccaaatataaggttgagtccagtgtgagtaaccaccaccaaattcaacttgtcggccaaatgcttcacctgtataggttcggccaccaatacggtcacgtgcctctaataaaacaaccttatgacctgcattacttaaatcccgtgctgcaacaacacctgcacatccagcgccaattactgctatatcataatcatactttttcatagcacactctccacaatctcagcacgaggtgttcctacacgttcaagggcagtgtagaaagcttctggttcagcccagtcttctggggcgaaagttccgctacgtttacctgtttcatcgagcgctaataccatgaatgcagcacaagccgtccctgtaatagcggccatatcgcgcattaaataggaatcttcacctgatttaacagttcttctgattgcaactgctggtctaccatttttagttccgtagactcgagctaataaaccgcctttatatggataggtttttcctatagcagattttgtcaaaaactcgaccatggcagagaatgaggattctttacgtttaacttggccgatcatgccactgattgcagctttccagcctttagctgaacctaatttgttattaagtagatcttcaaggaagtccacaccttcttttactgtcatttcaccatgatgaacagctaagccaactccacgccctagtccattaaatggggcagggtgtaaaccacctaaacaacggatacgttgagcagttggatatttgcgtggcaaagtaactggttctggatgagctgtttcatacattaatatttcacccaatccacctcccatcggtgcagtgcctgtttcgacaaaagtttcgtgattaacacgtttgccattttcccaagtaagacagtcacccgccgtgatatgtaagaaatgttcaagtacggcacgaccaatacctgggcgttcgtcaccaaccatccagcaacaatcaatattttcaacggtatctagctcatttgcggcatctaccactaacacatttgccatacctggtgaggcaccacaacctacatagattggaatacctgcttcttttgctttttcatgcaaagataacgcatgttcagtactttcaacgtcatcatcaaaatctaagtaaggaacttttgcttctaaacatgcttcaatgacaggcgctgaagttcgaatgtatggacctgctccaagtacaactaaatcagcaccattaaccacagcttgtagcttttgcttgtcatacaaatctaaatgttgtgtagttgctagcccttgagggagtttttcaacaagatttgaaagtaattcaggacgaatatcacatagtacaagttcccaatcacctttggctttagcaaaacgctcgatcgctaaacgacacatttcacctgctgcgccaataaatataatacggcgactcatataaattctccttagaatcagcaacccatgccgattacgatttttatttatttccatagttccaaagttccctggaacgaatgtttatgacgtctcactttgctgagatgacttagtgaaaggaaacgccgttaattatttttaatccaataattacactatgtcaatgacgcattgtaattattgaaatttaattaaattcagtaggttatacttgtttcaatttttgaatcatagaattaaaaattatttttatctaataaaatcaattgattgaatagaaaataataaatttaaggaatactttaaaaatttagttatttaaaaaagttttattagaatccagtttggtttttcacttacccgcttgttcagggaagaaggattgttctacacttacatagtgtcaataaattaaaaagtaactcgtaattatgactgtgaatcgccgacgtcctaaacatgacccgaaagaatctgaaagggaaattttaaatgctgcagaaaaatttttaagtgaacgaccatttcgtgaactaaatgtagatgaagtgatgaagcttactggacttaagcgtccagctttttatgtacattttcgtgataaatatgacttagctttacgtgttgttcaagacattggtcaggaactatttacattagccaatcattggttaaagggaaataattttccggaagattctcttcaggcattacaaggaatagtcaatgtttatcagaagcatggtgctgttttacgagctttatcagatgcagcaggagcggatgagcgggttgagcaaatttatcgttctttaatacaagattttattacagctacagcacgccatatatgtgaagaacaggaaaatgggcgtattagcctagaactgaatgtagatgaaactgctcgtgcattagtatggttagaagaacgctatttatcagaagcatttggccgtacacctcaagctgatcctatagttgttgtgcaggtcttgcataatatttggatttctacactttatcgtactaattaaaaatattagctataacttgatgaatgctcaaaaggaattgctcattcatttttttaattaaaatatatatttaatatttaaaataatttttaaaaatatttttcatcctttctcaatctcttaaatacaaattaaattttaatctaaaattacacagtgtcattgacatggtgtaattgttaaagcaatatatattcagctctacgatttcgtacgcattgctataaaacactcaacattttttcagggaagaaattatgtactgagtatgcgatagcctttttttgaaaaaaatgaataggcgaaagtgtgggtacgtgggctgagcaatatcaaatatcaaaggaaggaacattagatgaataatattccacatgcaaataagtcattctggctagcccactcaggcgaatatattccatcaccacctcttagaggtagcattgatgtagatgtggtgattattggaggagggtttactggattatctactgcttatcacataagaaaagtggattctgctgcatcagtggctgttcttgaaggcgaatgtgtagcatttggtgcttcaggccgtacctctggctgggttgtgccagttccagtacttgatcccactactgcaaaagtactttatggaaaagaaagattaactgaacttcaaaatttcgcatggaatggtctggactatgtgcaggacttaatcaaacgcgaaaatatggatagcgattttgaaatgcctggtgtgacatttactacacttcgcggccatgaaaaaagattagagcactttactaaatattggcaagatcaacctcgctctaaagacagcgtctatatggatagagctacggtaagccaagccctaaatagtgatgcattttctggtggatgccgaatgccacattctgggcaagtcaatcctgtaaagcattctcgagaactaaagcgaattgcagaacaggctggtgcacaaatttttgagcaaacgccagtattggatatagaagataaggaaacgttctttattctcaaaactccagaaggagaggttagagctaaacatattgtattaggtaccaatggttttactcatttattgccaccagaattggggctaaaacgcgcccaactccccatgtttgtatatcagttaattaccgaacctttaactgatgaagattggaaagcgcttggatggaaacatcgtggtcagttttatgacaaaacaacctattgtcctccaacctgtagaacgactgtagatggaagattgcaatttaacctatgtgatatctatgtaggagaagggcgttctatggacgaagctcagaaagtgcaattttatgatgccgctgagcgaatgtataaaaaggtatttcctgcatttcagaaattaaaaattgctcaacgttggagtggcgcttgttctattccttttgacgtaaggtctcaagtgggcacactccataatggtcgtatttcttatgcctatggatacagtggtgcaggcgtcatgatgtcacaaaattatggccgaattttagctgatcttgcattgcaacgtaaaacggagcttaccgagcattggtttgttgccaatggagaaaaaggacacgctaaatttaaacgtttcccactaattccgggtctcatcgctgcgctacgtacttatttcgaatacgaacgagtatcagcactttctaggagaagacgccttggactcgattaaacaatatgatgatgggcacgtatttacagcgtgggttgcattaatcggcacagtaatggctgcgacatgcctgctttgttttcttgcagttactggctttgatttgcaccaaatatttaaacctgaatttgcattaactttgtcggcaaaagaccaagcacttttcagaacctcaatgatttctgattgttttgggttttatcttccttttctggctgtaggtgtatatctgtggagaaagctacgtccttcaggtggattattgtcggatatagctattttattcctcgtgatttcaacaatgttaggtataacaggggctgctttacaagcctccgtgttaggaccacttgctgaaacatatatgtctggaaatgaaatagctaagcaggcggcgggcactgtttgggccaccatttcgcaaggctctcaaaatggtttatggccaatggaaggaccgacaataggtttttgggcaatagtcaacggactacttttgagaaaaaacaaatccgtattaggtttcccactggttctggttggcttgggatatgttggatttgctgtgcttcttttctcaggcttttctcaagcggctttattccttgaactgttcttattaccagtgcaagtagtttggttaggtattttcggtttgagtttattacaaagatagatgtaaagaattttagagccatatgatgaaatatggctctaaaaataaaaaactatcctaaggatttagggaaataacaaccaaaaaggatatagatatgaatgagataacaactaaaaaggcaaatccgattttattaggcgtacttggtgtattcgttagcaatatcagtcacgcttcagcacttgaacaatcgggccaatctatcttgccatttcttgaaaatgggaattatgcagaagcaaatttatttgcagttgattcatctgtttctggtgtagtcaatgatagagccgatcttgtaagagatcatcaaagtcgagatacaggtgatattgcagaaagtacgcaattttatacagctgcaataaagttaaaactcacagatcgtttaggttttggtgtgctatatgatcaacctttttcagcagacatcaaatatccggcacgttctaataatagttactttgataatgatattagctatgaaggtacatcagtaaaagccgatactcaaaatttaagtttattattcggatattctccatatcagctttttcaaatttatggtggacctgtttatcaaactgtaaaagcaaatgtagcgcttagaggtaatgcctatactcaggcttttaatggctataatgctaagtttaaacaacaaggtgaggttggttggttgttgggagggagctatcaactacctgatatagcattaaaagcagcaattacatatcggtctaaaatcaaatataaatttcaagtggaagaagatatttttggtgaaccattaaaacttgttgaaaatgagaaaaccaaattagagactccagcatcattaaatattgattttcaaacaggtatttccgaaaaatcacttgtttatatgaatttaagatgggttaactggaaagaatttgagactcggccaccgcaatatggcgctctatctgaaattattatgaaagaggtaactggtggagcttatacccaaggttttaagctcgattcttatcagaatgatcaatatagtgcgactgtcggtctcgcacatcaatttaaagaaaaatggggtgcttcaacagatgtaagttgggactctggtactggtgatcctgcatcaacaatgggaccaatcaaaggatcatagtcgcttggtttaggcgtccagtttaatccagctaaaaactactttataactggtagcttaaaatatttttggctaggtgatactaaaactgaagatgggacttattacttaccaatagagggaatcaagccatacgcagaacaggcaaatttcaaaaataaccatgcaattgcttatggtttgaaatttggatattggttttaagaagggtcgataaagccttatacaatggcagtaaacagcattgtgtaaggcacagatacttgttaaatatgcttagaacacttagccaaactatggtcacagtgaagatcaagtgacttactaatatatggagagtagcaaagccttatatatggtaggtttgcaaatcttttatttaacataatatacattatacgaacaattatatagtttaaactaatccctagttatttctatctttcagatctaaagctctctttatgtaggtttaagttatttggctgaacatcactatattattaccttaagtttttaagtaaaattaaataaatacgagaattatttacaacctattcaaaagtgattttatttttcatattttaattcgtataaataaaaaatctgagctaaaacattatttttaatttccgtgaatatatattatttcaataaatattataattaattaaattattttttagcttggtattttaggttaaatttttataattttaattaaagcatttattatcaataatttaattttacaataactaagatacattaatatttgtaaagtgtgatttaattatcgttttaataaaatagatgtagaaataaaacctatttaaacaaattaaataattagtgagatacgggtcacatattattttatgttttttaattgaaattgatttatatattgtttttaaataaaaaatattgtatcacttatattaactatttaataaataggtacttataaaatgaaaaataatatatttaaaattttggttttggcggtattttctacttccccactattttgttatgcaaataacacaataatgatcaaaggaaatattgttgaagacacatgctcaacaaaaagtaatgagatagaatgtaacgcagtcaataatttgaatattaaacttgatagtgaatatttaaataaagatagtctctataaattagctcaacatacagagaagatggacactagcattgaaagtctaggttctaatcgaaagattatacttatcaattatcattaagctcatttcatcacatttgatcttattactatagaagctgcaaaagagtgattgatacaattcaacataattttttatgaattgggtattgggtcactctttttctgcaaaaatgtctatttgtatattttttctatatacatctgcataatttattctatataattgtattgtaagaatttaaacttcttcttcacgtaaattgtttaattcttttccagttacatagtagccttatgtaattttcttatctctacgattcctttcttctaaacaataaaaactatttataaaacagctacataagctgtgttaactagctattaactgcaccccaaaagtgtgacacaattaaaattataaaaaaataatgtgacatagtttgcattttgtttaaaaagtgttagcattgttacattacttttcaagatgtcaaacactggaaaagtaaggaattaaacttttatccagacttttgagaaaacactatgaaaaaacttgctttgatcgctgctctttcggttgtagggattgcgaatgctcaagctgctgatggtacaattacaattaatggtttagttacagacaaaacttgtgacatcgttactcctgctggtaaagatttcacagtgactcttcctactgtttctaaacaaactttagctgttgctggggatgttgctggccgtactcctttccaaatcaacttagctaactgttcacaaggtaaagtagctacttactttgaaccaggtgcaactgttgacttcaatactggtcgtttacttaaccaagacgctactggtgctaaaaacgttaacgttcaacttttaggtagcaacaataacttcatcccagtacttgctgctggtgcaaacggtgctcaagctaactctcaatgggttgacgtagctgaaggtgcaagtgctgaccttaactactatgctgaatactatgcaactggtgcttctactgctggtaaagtaactacttctgttcaatacacaattatctatcaataattaattgatagcggggtttctatgtccgcatgggaaccctgttttgtgtagcactttcctgaatctttcttggttgagaactcgaaaaatgaaattgaacagttataattttttgctctgtacacgacaaatttcacagaacccttatcctatcagggttctgccttcttaaaattgccaaaatttccttaaactcttcttttttcccaaaaccaattaaacgctgaatcgccatttgaacatagtctaaaccatagcgaaataaactcattgagagtcgtccatgcttctttatttttatcgcttttttttgatcatgttgccattcacccgttaagtaacaccaacagaagcttatagctaacaccgcaatcaattttttcactcgtctagggtctgtcaagcgcgtattttcaagattaaacccgcgtcctttgagacaactgaataaggtttcaatttcccagcgtaatgcataatcctgaatagcattggcattaaactgaggagaaacgacgagtaaaagctctccattttctaactgtagtgcacttatatatagtttcacccgaccaaccaaaatccgtcgtttacgacattcaatttgaccaactttaagatggcgaaataaatcactaattttatgattctttcctaaatgattggtgacaatgaagtttttttaacacgaatgcagaagttgatgtcttgttcaattaaccatgtaaaccactgctcaccgataaactctctgtctgcgaacacattcacaatacggtctttaccaaaaatggctataaagcgttgaatcaaagcaatacgctctttcgtatctgaatttccacgtttattaagcaatgtccaaaggataggtatcgctattccacgataaacgattgcgagcatcaggatattaatatttcgttttccccatttccaattggttctatctaaagtcagttgcacttggtcgaatgaaaacatattgaaaatcaactgagaaatttgacgataatcaaaatactgacctgcaaagaagcgctgcatacgtcgataaaatgattgtggtaagcacttgatgggcaaggctttagatgcagaagaaagattacatgtttgctttaaaataatcacaagcatgatgagcgcaaagcactttaaatgtgacttgttccattttagatatttgtttaagataagatataactcattgagatgtgtcatagtattcgtcgttagaaaacaattattatgacattatttcaatgagttatctatttttatcggtacagagaattttttgttaggtttggcgtttgcttcatctgttgctgctcctgccgctcaagcagaaattgtaattcatggcacccgtgtaatttatccgtcggatgctagagaagttacgctacaagttagcaataacggttcaaagccagcacttgtccaagcttggattgatgaaggtgatccaaaaagtactccggatcaatcaaaagttccttttatgattgctcctccaatttctcgtgttgaagcgacaaaaagtcagacgctccgtattactgcccttccaaatgcttctcaatttaaccagaagcaagaaactgttttgtggttaaacgttttggatattccaccaagacctacctcaaaaaatgcagatacgacacctgataacttcttacaacttgcaattcgttcccggatcaaattcttctatcgtccggcttcaattaaagaagatgcgaatttagcagcagataagcttcaatgggttaaatctggtcagaatttaacggtaaaaaatccaactcctttccacattacgatgacttctgtttatcaaaaggttggagataaaaaagttgatttattgcctcaagggctaatggttaagcctttttctgaagcttctattcagcttaagaatagcaatcttcaggatatgagttttattaatgtcaacgactatggtggtcgagtcgaacaccaaataaaacttcagtaatcagattatctttttaataaatttaagcacctattatgtgagtaggcggacttagctatgccaaaaaaaaggcaagaatcttataaattattaaaacgccatatttgttattacttggcttctggcgttgttacaatgacaatgcctgtgttcgtgcatgctgaagaagcagctgcgagtgcgcctgtagaagctgaatttgattctgcttttttaattggtgacgctcagaaagtcgatatttctcgatttaagtacggcaaccctgttttaccaggtgaatataacgttgacgtttatgtaaatggtcaatggtttggtaaacgccgcatgattttcaaggcattagatccaaatcaaaatgccgtaacttgttttactggaatgaaccttcttgaatacggcgtaaaacaagaaattttaaccaagcacgctccccttcaaaaagaaaataatagttgttataaaattgaagaatgggtagaaaacgcattttatgaattcgatacgtctcgtttacgtgtagatatttcaattcctcaagtcgcattacaaaaaaatgctcaaggctatgtcgacccaagcgtatgggatcgcgggattaatgccggctttttgtcttatagtggtagtgcgtataaaacttttaatcagtctggtgaccgaagcgaaacgaccaatgcttttatgggggttacggctggactaaatttagcaggttggcaattacgtcataatggtcagtggcaatggcaagatacgcctgcggaaaatcaatctaaatcagactatcaagaaacaagtacatacttacaaagagctttccctaaatatcgtggtgttttaacacttggggatagttttacaaacggcgaagtatttgactcatatggttatcgtggtatcgatttttcaagtgatgatcgaatgctaccgaatagtatgcttggttatgctccacgtatccgtggtaatgcaaaaaccaatgcaaaagttgaagtacgtcaacagggccaattgatttaccaaacaactgttgcaccaggtaacttcgaaattaatgacctttaccctaccggctttggtggtgaaattgaagtttctgttatcgaagcgaatggtgaaatacagaaattttctgtgccttatgcctctgttgtacagatgttacgtccaggcatgaaccgttactcattaactgtaggtcagttccgtgatcaagacattgatctggacccttggattattcagggtaaataccaacaaggtattaataactatttaaccggctataccggaattcaagcatctgagaattacgctgcaatattgcttggtgctgccgttgctacaccaattggagcaattgcattcgacgtgactcactctgaagctgagtttgaaaaacaggcttcacaatcaggtcaaagtttccgtttaagttatagtaagttaattacgccgaccaacacaaacttaacacttgcagcttaccgttattcaaccgaaaacttctataaattgcgcgatgccctgcttatacgtgacttggaagaaaaaggtgtaaacacttatgctgctggtcgtcaacgtagtgagttccagattactttaaaccaagggttacctgagggttggggtaacttctatgtggtaggttcatgggtagattactggaatcgtagcgagagtactaagcagtatcagattggttatagtaataactaccatggtttaacttatggtttatctgcaattaaccgtaaggttgagtacggctcaaatgatgcgtcgcatgatactgaatatttaatgacgctttcattcccaattaactttaagaagaattcagtcaacgtcaacgttactgcttctgaagacagccgtactgttggtgcaagtggaatggtgggtgatcgctttagttacggcgcttctgtgtcacatcaagactatgcgaacccaacatttaacgcaaatggtcgttaccgtactaactatgcaactgttggcggctcttatagtattgctgattcttaccagcaagcaatggtaagtttaagcggtagtgttgttgctcactcagatggtattttatttggacctgagcaaggccaaaccatggtacttgtgcatgcacctgatgccgctggagcaaaagtgaataacacggttggtctaagtgtaaataaagcgggttatgcagtagttccttatgttacgccataccgccttaatgacattactcttgacccacaagaaatgtcgagcgaagttgaacttgaagaaacaagtcaacgtattgccccatttgctggtgcaattgcgaaagtagattttgcaactaaaacaggctatgcagtttatattaatagtaaaactgcagatggcaacagtttaccatttgcagcgcaagtctttaaccagaaagatgaggctgtaggtattgttgcacaaggtagtatgatttacttacgtactccactcgctcaagatcgtctctatgtgaaatggggcgatgaaagtaatgaacgttgttcggttgagtacaacatcagtaatgagttgaaaaataaacaacaaagcatagttatgactgaggctgtctgcaaatgaaaagaatattattaacaggtttcttatttacggctggccttggtgtatacggtgaagctaatgcttattgtacacttagttctggattcaccacagttgatatatcaatggctgtgggacgtgttgttgttcgaccaagtgacccagttggaaaaatattaagaaaagcaacttttccaattaatccaaatggatccacactccgttgtacttcatatagcgatactattacggctgcattaactcaaaactatcctttaagccctctaggcaacagcatttattctacaaatattccaggaatcggtatccgtttataccgtgaagcagaaaatgcaactaatttttctggctattatccgtatacccgtagcttaacccccggaacaacttacaatcttgctcagggatattttgttgttgaaattgtgaaaactgcagatcagactggttctggcacattggttcctggcttatatagccgttactatgtaaatggtcatatggatcgcccttttttaaccagtacagtttatggtaatgcaattaccattgcttcttcttcatgtgaaattcagggtaatatcaataaagttgtacagctaccaacagttacaaaggcaggttttaaaggtgttggctcaactcaaggcgaccaaacctttgatatgaacattctatgtaatggtggtattaatccaacaggttatgaagagaaaaacctcattagcttaacttacgactttacccaagacggaacaaataatcaggtcctagcaaatactgctccgacatctgaaaaagcaaatggtgtaggtgtacagttactctggaattatcaaaataaaaatcaggttatcaaaaaaggtgacaaattagccttaggtaccttgtcttctaaccagacaattcaatataacgtaccaatgactgcccgctactatcaaacagcaacaaatgtgacggctggtaaagtacgtgcaatggctactgtaactattgaatatgattaatcatattcaatagtttttaaacctaataatttcaaatatttaaatattaataataaattttaatttaacactactttctaagaaatttgatacttaacttaataggaaaatttatgaaaaaaataggtatagttactgttggtgcagtgacattatgttgggctatgtatgaggtatcttctgataataccaatacagtaacgcataatgaggctagccaaaaagtcacatttaaaaacttttcatcaactgcaaagaatgaaaaattagcgcctcaaatacttttggctcaaacgaactctcttaattctgccccagtttgccaatacaattttgacgcgactcaagaagattatgatctatttaatacccaatatcctgatcgaccacctacaatgagatttcctctaattaatgggcaaaaatttggctttaaagtagagcctgtcactgaagacaagtatggttatttagtttatacagcaaaaagtaaagtaaaaatgaattcaaccagttatgagggggatttcttattacccaataaaggcattattgcttttgaaatgcaacttaaagtacccacactttcttcaagcacttcttcttattcagccgagattagttttaatggtataactgataataactatacaattagatcaaattatcattttgatattggtgttcatgattttgaatttggtgaaaatcctccccgtttatatcatagcgtatcatctgagatgggagattatcagttttttgataattactttaaagacaaaaaaatgacggataacacaaatgaatatcaacgcctaggtgtttatattaatcaggatacgaaccaagtcggatttatttctaatggtgttgatgaaggatatcaatttaaactaccgggtgcactacagaaaatagcttttacagttgagggaattgcatatattgaatctacaaatttatttggatatgaattttctaatgaactgattacagaccgtaatgcgctaaagtttaactatcctcagggcacaacagatatgtgtggtaatgctatttaagatataaaactataagtcataaaaagggctgaatcacagcccttttttatttcatttagaaatgaatgacagtacgaattgatttaccttcatgcattaaatcaaaagcggtattaatgtcttgtagaggcatagtatgagtcacaaaaggttcaagttgaatatcgcctttcatggcatcttcgaccattttaggaagttgtgaacggccttttactccaccaaaagcagtgcctaaccatttacggcctgtaactaactggaatggacgagtcgaaatttcttgccctgcaccagcaacgccaataataacggattgtccccaaccacgatgtgcacactctagagccgagcgcataacattgacgttaccgatacattcaaatgaatgatctacgccccaacctgtcatttctacaatcacttgctgaataggttgatcataatcttttggatttaagaaatctgtagcaccaaactgcttagcaagttcaaatttatctggattagtatctacgacaataatgcgccctgctttcgcttgacgtgcaccttgtacaacagctaaaccaataccgcctaaaccaaatacagcaaccgaatcaccttcttgtactttagctgtgttatgcacggcgccaataccggtcgttacaccacatccaagtaaacaaacttgttcgtgattcgcttcaggattgattttagctaaagagacttccgcaactactgtatattcactaaaggttgaacaacccatgtaatggtaaatcggttcgccgttatatgaaaaacgtgtagttccatccggcattacacctttaccttgcgtcgcacgtaccgcaacacacaagttagtttttccggatttacagaataagcattctttacattcagctgtataaagtggaatcacgtggtcgccaggttgaacacttgttacgccctcgcctacttcaactacaacacctgcaccttcatgacctaaaatcgctgggaaaacaccttctgggtcatcgccagataatgtaaaagcatcggtatggcatacccctgtatgggtaatttttattaaaacctcaccagccttgggtggtgcaacatcaacttcaacaatttctaaaggttttcctggggcaaaggcgacagctgcacgagatttcatctttgggtttcctttatatcattcggtacttatagtcgagcaaaatagattatgtaaccgtaatacaagagcttaattttgcttaaattaaaattggctttcatgacaatccatcacagcatagccagtcagaaacgtctaagcaagcctgtactaaaaaaagaagaaaacctcctaagtgaagaggttttctatcagattacttctcttataaacagcttatgtttacttaaaggtaaatatctggtggatacggtgtgttatcactaattggtgagtaaagtgtattttcaacaaagaagccatttggggcttgggtcgtatcaattgtaattgaatcgaacatgacttgcggataggcccagataaactgcttcatgaggccaagagatacgttatttttcatatcgccaaaaatcctctgccaaattggcgtccgataaggtttgtttttgtcgaatccatagatataagcaatagatgcatctggtacaaatccagataaataagcaactttatttgccggataacctaaatcttgagttggtatctgagaaacagcttgatgagctaaatctaatttagcttctaaaagccagtcataagcttcagtcatgatgtaatcaaaatttggatatgagtagtgctggcttggatagttgatataggttgctagggtttgtattggagaacgaatggatgggaaaaatattaaaggacacacttgagcatttgcatatttagctttaatggctgctcgaatattttgacaggtctgtcctaacttatttcttaaccaagttttaaactcatcatacggcgtacctgttttattcatagcctcatagattgtgcctaggtctggcgcatatagtcctgtatcggcattaaaggctaattttgttggatagtcatacacacaaggtaggttcgtgtccgtgttataccaccaccaaggttcaccaatttgcatgttaacattacagccgccagcaaccattgtatctgcgaactcaataaaaactttgtgcaaataagccaaagcattttgatcacttaagctaaagaaataactcggtggttggtaacctgttttacctaaattgctattccagtcacgctgtgcccaaaactcatttgctgcaagtgaatacatctcaaaacttaccccaaaaatgggttgcatgtttgcattatgtagagcttgggcatatttctcatgccattttcgggcacatgggttgacgactgcctcacctgttaccaacgtatctggtatttgccatttattaatatcgcttttccatgtcatttcgggataatgcgacattccacaatagtggtttaccaacccctgatatcccaaagcgaccatattgttgactaggcgctgcgggttcaagtcataatggtcatcatagctggtacagatcccataattgtgctgaggtacaacaacacgactcagatttagctttgcatttgttccagtcacgactgaattggtaatacgaatataaccatcttccggctggcttaacggcgtagctgactgaccgttataatggctagtaaagcctgaaaatgagatacgttgaatattggttaccggaaagctatctgtagcagaaaaaccagctttaactgtatcccagttaatatgaatgtgcgccgttcgcgacgaaggattatttgcataattaaataagacgatatatgcaattttatctacgccattgtcatgatagtacaccgttaaagttggcgttaaacttggattattaagtacgggcatagaagccgataattcaatatcaaaatcccaaactacccctgcataactatatttggtttcatatgctaaaagtttatgatctttcgtatcataagaatcccagctaatccctaccaagtcatttgtcatacgtgatctaaaagatgcttcaaatccatttccataatttgtaatggcaaaagacgtggtttgtgggccgtctattctccagtaaataggactaaaccgatcaataagtgtattttgggtaattggatgaggtgatgtattagtattattttgcacattttgtcgattagttatcatgacgtcattctcttaatgtattaagaagttttatattaaataagtattcttattttactgttcagataagtaacaatgacgtttaaattatttacagtgaataattttaaaaagctcaaaataaacttaaacaaaaaacttaatattattctaaaatattttttctaccgaggagactataaatgtcaaaattaatacagcctatcagttttaaggctttgtttatatttactcctcttctgtttgtatcaataggttgtagtgaagcgctatattcccaaacaatcccatcagtaaagtcttcttcagaaaatatcgactatccagagatcgatacagcattaggagaaaagttacaaccgaatgaggaagtaatagctcatcaaataactcaagttattgagaagtctattcgtgaacagtatacagcgggaaatgctttgcgtgatgcacaccctaaagcgcatggatgtgttcgtgctgaatttcatgtacttaaaaatataccagctcaacttgcaaaaggtatttttattccagataaaaactatgaagcatggattcgtttttcgaatgcttctaatgatgcttctagagcagatattgaaaaagacgcacgtggaatggcaataaaaatcttagatgtatcaggtcagaaaattttagaaaatgaaaaagaagctacaactcaagactttattatgattaatcaccccgtcttttttgtaaatgacgggcaaagatacctgtcttttatgaatgatctaaatagccataatatgatcagaaagcttcatatgccgtttgctttaggttttaaaggtaccatgaatgctttaggtgcgcgtaattctaaaattgcaaatccactatatgcgcggtattggtctatggtgccctatcaattaggattaggtgttgaccgtcaagcggttaaatactccgtaagaaattgctctacagtgactgcagctctacctgatcatcctagccataattttttacgagatgccttaaaagatacattgcaaaagcaagacgtgtgtatggaatttcttatacagccaagaacttcgactaaaatgctggttgaagatgcaatgaccgagtggaaagaaaatgaagcacctttttatcaagttgcgaccattcatattccaaagcaaagctttgatacacctgaacagaatcaattttgtgaaaatctctcttttacaccgtggcatgctttacctgagcataaaccgcttggcgcaataaatagaatgcgtaaaattatttatgaaaatataagcagagttagacacgatatcaactcagctccccgacaagaacccaaaaactaatttaagtataaaagaactgccaataaccaaagcagttctttatagttcagtatttgatgaggatggccatagattttctaatgtctatacatcaatttctcagcaatagagcttaggttggctaaattcttttttattggataatctcctttactcgtatctatggtgatccgatcaatgaagtctgctaaccataaaataaattcttcttcatttttatagctaggaatcaaactgctatcaaatttgagcaatacttcatcttgaaggttaagcagcgaaccaccgaaatctaaaaaattatataaaaattttaattcagttcctgtaatggctttttttatttctataattaaattatttaagttttctagataattgtttgaagaatcttgtttaatgtttttagaaattttttctgctaatagtaagtattttggcatttctatctccttatcaatttttttataaaatatgagtataaaattaaagttataaatttaagttttcagtttttattgaagtgttatttattttttaaaattaatagagttttatgtaagttgcaactttttattattttaaagtgtgaactactttgaattatattctgagtaaattaataggttttatatgattactaaattaaactatgctcttctttaaaataaataagctcaatacttttaattattgagcttatttttaattgatttagtatgactgaagtatttcgctttaaccttaagtcattttatgggaactcttcattttatgaattttcccgcactttctgcattctctgacttcatcatgtgaaatatcaaaatcatattcccagatgtgcatgcagaaaaattgtctaatattatggagcatagacacctccttaaaaaaccaacaattatggaagttttttagaaattcagaattcttctagactcaattgtctaaaagggaaatttttcaccatatcttttttgaaaggtatgtgaaaaagcttaagttgaagcaaaaagaaaatatttcaaaatatcttatctccttactcaatgaagataagtaaaaggtagcactaatctatgtatctgtttttatagggaacaagtgagttctgtttacaatgaaaacttatgtgaagagattgagataaaaaagagattaagccacaaaaaaccgccccaaaaggcggttgctgaattttaacagctatgaatagaagtacggcagaaacccttctatatttcttatcacattatttttcttcgtttataattttcataaaagcttcagatttaaaatagttaataatcagttcaccttcatcatctggatgtgtagattttgctggtgtcttagcgttgtcaaattcgtaattaaacttaaaatcgggcggaataaattttgagataggtggaagatgggtttccccgcctgtcgtcattcgttctataaatccagctaaccataaaatatattcatctttatttttatgactaggcatgaggctaatatcaattttgacggcacattcatctagtggctttgttaaacattcgtcaaagtcaataaaattatatttaagcttaaactttgtacctttgatttccttacgaatcacacctattaggttatttaaatgctcggtcggagtatcagagaaaagatcatcttctttaatttttttatacaccttttcagcaatcattaaatattgtggcatttcctatctccttccttcctctttctggctggttgcttactcagctttttaaggaagtatgatagaaatcatgtgttgtaatgtagttgttggtaacttaattgtaagtaatgtaaagttatgaaatctgagtatctaataaaacgcatcttataacgacaaagagaactacgtcacttttttacttataaaaaacgtaaatgatcgaaataattgtttgcaataaaatacagctcacataattaggttgattagtcatatataactatagaaaatttaaaaaatattttataagctactgtttttattatattttaaattttactcttcttagattataacaaaatcatacagttattgtgaattttgacatataaattgcatataagaatgctcttatagctctaacttggatgcaaattaaatgcttacatgatcaaccagctatatgagcagtacagtactatggccttaagtgcttggggctttactgatttaccttcttatacagataaatatgatcctaatgagaaagatatagtgataaagacaaataattggttgaatgatgaggcagcagaggaaaaaactcagcaaggtcttactgcctttgtagctcttgatgacgcattcatgagtattgcatcacggatttatttaattagaaattcaaaggaaacgattgatctacaatactacatttggaccaatgattttgtggggaaccttattttacatgagctgctcaaggcagcggatcgtggcatcaaagttcgcttattaattgatgatcaaaacggtataaagcttgatggcatattaagaagccttttacagcataccaactttgaaattagattatttaatccttataaatttcgttacttacgtatcttcgattatctcttccgatttaaaaaagtaaatcatcgtatgcacaataagctcattattgcagatgcatcgattgcagtaacaggcggtagaaatattagtagtgaatattttgaagcaagtagtaagtttcaatttacagatatggatatcttattttacgggcatgcagtgcgacatgcccaagctgtatttgctgatttttggcaaagtaccctaagtgtaaatgcaactgacattatcggaacttgtgctgagcaccatttaaaagctttaagagagcactatgaacaactccatcacgaagaccatagcctcactgaagataagctttacgatgcgcagagttatttaaaagagcttttagagcataaccctattcaatggtctaaggcccattttgttgctgactctccgaagaaaatactgggcactgcaactgaacatgaaatgctttatggccaagtcttgtctattatgggtaaacctaagcaacacttagaattagcttcagcttattttgtacctacccaacaaggtacttattacttaaagcaactacgagttgaaggtataaaagtccgcgctttaacaaattcttttgctgcaaacgatgttgcgatcgtacatgccttttatagccaataccgtgtagaaatgcttaagaatggtattgaactgtatgagtttaaacctgttctggaacgacgacgtagaacgtggtacgaaatcgtaacaggcagcgttataccagcaaaaggaaaaaataagtcgagcttgcatgccaagttttttgatgtagatggcaaagtctttatcggatcatttaactttgacccccgctctacctatttaaacaccgaagtaggtttggtgattgagtccagtcaattacaaactcagatttctgtcatgttagatcaacatttacctcaagtagcatatcaacttaagctaaatagccaaggccaaattacttggctagattaccaagccaacggacaagtcattgaatatgataaagacccgggaaccagccgttttcagagaacaatgattaaagctgtctcttatttgccaattgagtggatgatgtaattttcttattacaagaaaccgatttccttaaagaatttctgataggcttctgcttttttctcgagagctaatggatatgctctagaagatgacggtaatcgatataaattaatatcgcggtctgcaaaataagttgatgtagatgtcccaattaagggtttttccgtgttctcaggtaaaactgagattaaggtatctgtggctttatcgcccgtagtcataatagtgtgacattgaggaatctgtttcaataaaaccgctaagtctgtcggagtgacaatttcaagaaacttatctgaagcattgccctttaggcgtttaatttgatacgccgtatcaaaaatagcaatgcctgtctcaatcagaaagttgcggatagcttcttcgttaaagcttttttggttctcacttaaaaaataagttttatcttgaaaaaagattaaaccaaaaattctccacatatcgttttgaaagttcggatagtaaaagtccatcttccatttattacgtggcggtggaaaacttcctaacattaataaacgggcattttctggcaaaaacggttgcagtggatgggtttctatctcaattatcataaaaaatcagtatttacttcaaaatttataaataacttaacgtattttaaggttaatcacgagtcaagaagtgcaaattatcttaattaaatgtattgaggcgaaacgtttagttgtttcgcctcaatcatttctaattttatattcatgctaaaaaccaaaaatatttaagaatttaaaactttaaagactttccctgttctgggatgagcaaaggtgttatcttgatctaaattgataactttatctgaaatcacaatcttggaaagcggtaaccagttttgttcgatttcagccgaagctaaatttttctccaatgtattttcaaaaatttgctctaccacaatttccatcccacacatacttttcgcattaacttcttttaaaatatggcgctttgacattctaatctccatttttttattcttaacataaaaaatagtaaagggtgttttgctacaatgtgtaaaatttaacatttgaagtgttttttttgttttaaacatatttatttaataattaaatgaatagtggaatatctttaaaaataagttttattattaaattaacttattaaagctatctttattttaagtaaaattaattttataaaaaataatatttaaagggctcacgtatgaacccttgcatttaactttaaacctggacagcattatcgagtgaattgtcatctttactcttattattatccttactaatcaatgagtcggtatcactatcagtagagaagctcttactgttcttttgctttttcttgtacatacacatgccaatcgcaatacctgttcctaatactaaaattgactttaacattttgcacctcttcaattgacggagaaacttctgagaaatcaacttaaattaatagcatattctttgttatttaagggctttcatttgagccgcttttgtaaggtatttaatttttatgttaattaaaaagtataatattttgagaaaataaattttgatacaaagcaaaaagcctattctcaaaacagaataggctttctactgtatttcaggattaagcagtattattaattgctttaagcaatcttatttatgtttaaatacaattccaatgtatttaatgctgaacttttagtcaagataggaaagcgatgatttgcaattaattggctattcttgtgatgaggttctcattttgtaattaagcaaaagaaaacgcccatttctacttctcaaaaagaaatgagcgtaagtgaaaaccactaaagacctgaaataccaaatgttcttacatttagtaatgttgattctaattaacttagcaattggttgacaattaaactagttgtactttttttagtcatttcggccaataaaaaatgtaaaataattcgctatttttaatatatttagcaataaattatttacttaggatgcgattgagcacggttagccagttagaaaaacaaattttttctataatctcattcgaataatgtcgcttttgcattgcttcaatcagtaggtgtagtccccttacatcttcaatttcatgactaatcagtgctccatcaaagtcagaaccaaaaccgacatgattttctcccatttgatctattaaatattcaagatgttctaaaattacctcaatggatgtgtttgcatcacgctgcccgtctttacgcaaaaatgcgacatcaaaatttaacccgactatgcctttagagtccttaattgctttaagttggttatctgttaagtttctggcttgtggacataaagcatgaacatttgagtgagttgcgacaattggctgctgaagaatgttagctgtatcccaaaaagctcgttcattcatatgggaaacatcaatcaccatttttttatcagcacagcgctttataaatgctttaccttcgtttgtaagccctgctccggtatcaggtgaatgcggaaacttggcatttaaaccatgtccaaaacgacttggtctattccaaagtggaccgatgctacgaagcccagcatcataaaatacatcgagtaaatctggattatgttgtaatgcttcagcaccttccatatgcaatacaatggctaacttttgctgtgttaggcagtgctggatatcctgaacagttgtgcaaatttgaatgtcgttagagtactcggcaagttgttttgctaaatcgagctgtgccaaacaaatgtgttcaatttgctgttgcgtgaagtcagatgcgtcttggtcaaatagtttgttgggatgatgctgcttaacataatgaaaaggcggcaagaaaatagcaaacataccgccaacaaaaccggcttgttggcaacgttttaaatcgagatgtccggctaaaccttcttgaataaaagcttgagcaggattgttataatcacttaaccacaatcgggttagtacatcattatggccatcaaaaacaggaaatgtgccatggttcatatcggttttctcatagctaatcatctacaatattttgaaccggaatgttttgttgaaccgtgaattgctttgaatttcggctattacggaataccaattttcccagagaggaatcaatttcgctctcggcacgtgcctgttcaatgagttgatgatacagcgatttaccacaaacagggtctgcgttacttgcgtcgcctgttaacatataagcttgacaacgacagccaccaaagtcgcggtctttatctgggcaactacgacatccttctggcatccatgcatcaccacggaagtggttaaaaccagtagactcataccagatttttgataggctttgttcacgaacatttgggaaagatatcggtaattgtcttgctgcgtgacaaggcagagccataccatctggagcaattgtaaagaaaattttaccccagccattcatacaggcttttggtctttcttcgtaataatcaggcactacaaaaataagtttgcaaggatgattttgcgcttttaacttttcccgatattcattggtaatacgttcggcacgtatgagttgttcttgtgtcggtaataaaccctgacggtttaaaaacgcccaaccataaaactgacaaattgctagctcaactgtatccgcattaagttctagacaaagttcaataattttatcgatctggtcaatgttatgccgatgaattacaaaattgaggaccatcggataatcatatttcttaacaagtcggcacatttcatacttttgttcaaaagcatgtttcgaccctgctaaagcatcattaacgaccggatcactcgcttgaaagctgatttggatatggtctaggccagcttgctttaaatgcgaaatacgctgttcggtaagtcccatgcctgaggtaatcaggttggtgtagaagcctagttggtgtgcatgcgccacaagctgttccagatcttgacgcaccaaaggttcaccaccggaaaaaccgagttgtactgcccccatttgacgcgcttgatcaaaaacatcaaaccactcttgtgtggtcagttcatttttatgctgtgcgtagtctaaagggtttgagcaatatggacattgtagcgggcaacgataagttaactccgctaataaccataaaggtaggccaacaccttctgtcatactaaatcaatccagtgttgttgctgggcaactaacatgtaatcaataacatcgttgtcaatttcgggtatatcaccaaattgttgcttgagctgggcaataattgcagaaacattatttgtcccatcaatatactgtccaatcgcccctgcactttcatttaatttgatcatgccttcagggtataaaatgacaaagccattttgagcaggctcaaattgaaagcgataaccttggcgccaggtaggcacaagatttacatcaaattgttctttattcatttaaatagtcctttgtgccatacccgttcttgagtcacgctatgatacggtgcttcattgtgtacatatgccagtgttaaagcatccaaaatgctccataaaatatccagtttaaactgtaatatttccagcattctttgttgttgttcatgagtagtaaatgaatcaagcgtgattgttaaaccatgttcaacatcacggcgtgcttgacttaaacgagagcggaaatattcatagcccttgtcatcaatccaagggtaatgctgtggccatgattcaagtcgagactgatgaatctgaggtgcaaatagttcagttaaagaactgcttgctgcctcacgccatgacgcacggcgtgcaaaatttacataggcatctacagcaaatcgtacacccggcaaaaccaattcttcggaaatcacttgctcacgactcaagcctacagcttcggctaaccgtaaccatgcttctcgtccaccgccatcaggatattcaccatcttggtcaatcatgcgttgaatccactcctgtcgcacacgttgattaggacaatttgccatgatcgcagcatctttgagcggaatattgatttgatagtagtagcggtttgcaacccaagcctgaatttgttgttgagtggcttttccttcatacatcatcacatgaaatgggtgatagatatgataatactgacctttatcaataatggcctgtttaaattgttcggtcgttaaagcttcaggtgtttgagtcatgtttcaccttagagttcaatttgcatgccatcaaaggcaacttctacaccatttgcttttagttcagcaaattgagcagagttttcatttaaaatcggattggtattgttaatatgaattagcactttctttggtgtactgagttggttcaaataagacaacgaaccgccttcaccactaatgtataaatgccccatttcacggccagtttttttccctacaccggtttgctgcatttcatcatctgtccatagtgtgccatcaatcatgacgcagtcagaatcttgcataatctgcatgatttgatcatcaatctttccaagacctggcgcatagaataactgcttctgtgttttatgatctttaataattaaagcaatattatctccctcatgcggatcatggcgatgtggggaatatgggggtgccgcgctttgaataattaatggtaaaaattctaaattttcgaaaccattaattttaaaagcttgtttaggatcaatttgatgatattgaagaccaccattccagtgtttcaacatattgaataccggaaaacccgtggtgagatcttgatagaccatttcagtacaccacacattcattgggcagccttcacgtaaagttaaaagtccagtggtatggtcaagttggctatccattaaaataacattggtaataccagtatcacgtaattttcgtgctggttgagccgctttaaaatcaaataattgttgacggatatctggtgatgcgtttaataaaatccagtctacgccgttttctgaaattgcaattgaagattgagtacgcactttggcattaatcgtacctgtacgaacaccatgacaattaggacaattacagttccactgagggaaaccgcctccagctgctgaacctaaaatataaatatgcataaaattaatatcttattagaaagacataagccctagaacaagactagggcttatgacagatttgaatagaaatgattaacgtgcttcaaagtacattgttacttcaaaaccaatacgtaaatcagtgaaagctggttttgtccattgcataaattttactccagtcagtactaatctcgtgaaatgaatcacttgattaaatcacataaggcaattaaaaatttattctaattaaaaatgccacgtttgtagataagctcggaacaagatattgttcgataattgtgttttttgtccaaattttaataaatcctgatctttcaaaagcatttgaaaagtcataacaggtcaatgttctgttatgacttatgccttacccagctaagttcatcaagtgttgctgtgcaatataaagttcttcttccggcttaggatgacattgcacccaagttccatcagcctgtaattcccatgcttgacgattgtctttcaaatagttgtttaagccatcttcaatgacttgtttctttaattttttattttcaattgggaagcaggtttcaatacgagagaacaaattacgttccatccagtctgcacttgcacaataaacttttgtatcaccatcattataaaaatagtaaacccgcgtatgctccaaataacgaccaacgattgaacgtactcgaatattctctgaaagtcctgcaacttgtggtctcaagcagcaaattgaacgaataattaaatcaatttttacaccagcttgtgatgctttataaagcgcgctgatgagctgtggttcagtaagcgcattcactttaatgatgatgtgtgcttttttaccagcaaggctatttttaatttcttgttcaataagttctaacagctgagaatgtaaggtaaatggcgcatgaaaaagctttttaagctttgccattttgcccataccggtcagttcttggaaaattttatggacgtcttcacaaatttccgcatcattggtcagcaaaccaaaatcggtatagattttggcattcactgcatgatagttgcctgtacctaaatgcacatatcttttgattttgtcttgttcacggcggaccactaaaatcattttagcgtgagttttatagccaacaatgccatacaccacgactgcgccagcttcttgtaaaacgtttgcgacttcaatatttgattcttcatcaaaacgtgcccgcaactcaataaccgcggttacttctttaccattacgcgccgcttctgcaagtagctgtacgatttccgagttggcaccactacggtataaggtttgtttaattgccaagacatttggatcttgcgcagcttcccgaaggaacttgataacaggtgcaaaagaatcaaatggatgatgaagtagaacatctcctgcttttaacacatcaaaaatcggttttttagtgtataaaagctgaggcaaaacttgttgatatggtttatagcgtaactctggtaaatcaaagtttgagataaaacgggctaaattaacggggccatcgacgtagtaaagatgttctgcatctaaatcgaattgctctaataaatagttagcaatttcttcaggacatttttttgctacttccaaacgaactgcttggccaaaacggcgtgaagataattcgccttttaaagcagcagccaagtcctctacatcttcagaaacggttaaatcggcatttcgagttacacgaaattgatgacagcccgtcgctttcatacccggaaataaatccgaaatatgttgatggataatggccgagagcagaatgtaatgctccgcaccgccagaaatatgttctggaattttaacaagtcttggtaacgaacgcggtgccggcacaatagctaaatcaatttgacgtccaaaagcgtctttaccttctaaagttacaatgaagtttagacttttattgaccaatcttggaaatgggtgtgctggatctagactgattggcgtaactacgggttgtacttctttaaaaaagtattctttaatccattctttatgcttttctaatatatcgccgtgctgaataaaatgaacgccatagccttggagttgcggtaacaaagtatagtttaagattttatattgctcttcaaccgcctcatgagcattttttgaaatttgctttaatacttctactaacggtaaaccttctggtccggttgcctgactcatcaagctaattttctggattaaacttgccacacgaatttcaaaaaactcatccagattacgcgaaaaaataattaaaaaattcaaacgttccagtaatgggtgttctatatctttggcttgagcaagcacccgtttatgaaactctaataaagatagttctctattaatatacgtttctaaattgtgctggtttgagctagctaaagtgggcaatgatgtcattcttgactcttatactgggtaaaaaagttaaaatgaataaaaaagattaatttattaatgtataaccgattttattcaccggacattttgtaactgctttattgcaaattcatgaattttttatgaaaaccttaaaattaatatttatttttgccttatttacttccttctagtcatccatatctaccatcatcttaacattaattttttaaagatcattctatttcgattcagtttcaattttcatcaaatattcatactctatgcgtattttttatgcatcttaattcatcaattgataaaaaatgacgactttaaacatactatttaagacaacatctttatgtctggcaatggccttattggtaggctgtaatgataatgatgacaatgattcaagcacaccagcaccgcgaagtaaccaaactgtaaatattttagctttcaatgactttcacggaaatttagaaccacctaaacgttacgttgaagcagcgaatccaaatgatgcatctcaaactgtacgtattcctgtcggtggtgtgagttactttgcagatgcaattaagaaacttaaagctcaaaatcccaataatgctgttgtgtcagcaggtgacttaattagtgcttccccactcacttcttcgttatttctagatgagcctactattgaagtcatgaatgatattcaaattgacttcaatgcggttggaaatcatgagtttgaccgtggtacagatgaattgcgtcgtttacaaaatggcggttgtcaacaatataccagcactgccccatgccaaattaataaaaactttagcggcgcaaaattcaatttccttgcagctaacgtggcaatgaaaaatgatacaagtaaaacgatttttcctgcctataaagtcaaaacttatggcgggattcctgtagcttttattggtttaacactcaaagcgactccaagtattgtttcagcggtgggtattaaagatgttgaattccgtgatgaagcagatacggtaaatgctttaattcctgaactccaaaaacaaggtattgaagcgattgtcgtcgttgtccatgaaggtgcagcgccaagtacgaaactcaatcaaaaaacatgtgatggcttaagtggaccaattttaggtattttagatcggttaaatccggcagttgatattgttgtttcggggcatacacatcagtcttatatttgtgattatgcaaccaagaatccagctaaaccatttttactaacctcagctggccaatatggcactcttattaccgatattaaggtggagttggatggtaaaactggcgatatcattaaaaaggatgctaaacaaattccggttcaaagtgaggcctatacttcgggtacaaccactgtaagtctgacagacctctatcaaaaatttagta

(The sequence listing continues in the following parts.)

1. A method of determining an antimicrobial drug resistance profile for a microorganism, comprising:
obtaining or providing a first data set of nucleic acid sequences of a plurality of clinical isolates of the microorganism, wherein at least a part of the nucleic acid sequences of the first data set are assembled; and/or obtaining or providing a first data set of nucleic acid sequences of a plurality of clinical isolates of the microorganism and aligning the nucleic acid sequences of the first data set to at least one reference sequence;
analyzing the nucleic acid sequences of the first data set for at least two genetic variations of the nucleic acid sequences comprising at least one genetic variation in a chromosome and at least one genetic variation in at least one plasmid to obtain a third data set of structural variants;
providing a second data set of antimicrobial drug resistance and/or susceptibility of the plurality of clinical isolates of the microorganism;
correlating the third data set with the second data set and statistically analyzing the correlation; and
determining the genetic variations in the nucleic acid sequences of the microorganism associated with antimicrobial drug resistance.

2. The method of claim 1, wherein the genetic variations are annotated to a pan-genome of the microorganism and/or annotated to one or more reference genomes.

3. The method of one or more of the preceding claims, wherein the method involves determining the resistance of the microorganism to one or more antimicrobial drugs.

4. The method of one or more of the preceding claims, wherein the antimicrobial drug is selected from the group consisting of Amoxicillin/K Clavulanate (AUG), Ampicillin (AM), Aztreonam (AZT), Cefazolin (CFZ), Cefepime (CPE), Cefotaxime (CFT), Ceftazidime (CAZ), Ceftriaxone (CAX), Cefuroxime (CRM), Cephalotin (CF), Ciprofloxacin (CP), Ertapenem (ETP), Gentamicin (GM), Imipenem (IMP), Levofloxacin (LVX), Meropenem (MER), Piperacillin/Tazobactam (P/T), Ampicillin/Sulbactam (A/S), Tetracycline (TE), Tobramycin (TO), and Trimethoprim/Sulfamethoxazole (T/S).

5. The method of one or more of the preceding claims, wherein the resistance of the microorganism against 1, 2, 3, 4, 5, 6, 7, 8, 9, 10, 11, 12, 13, 14, 15 or 16, 17, 18, 19, 20 or 21 antibiotic drugs is determined.

6. A method of determining an infection of a patient with an antimicrobial drug resistant microorganism, comprising the steps of:
a) obtaining or providing a sample containing or suspected of containing a microorganism from the patient;
b) determining the presence of at least two genetic variations of the nucleic acid sequences comprising at least one genetic variation in the chromosome and at least one genetic variation in at least one plasmid, as determined by the method of any one of claims 1 to 5, wherein the presence of said at least two genetic variations of the nucleic acid sequences comprising at least one genetic variation in the chromosome and at least one genetic variation in at least one plasmid is indicative of an infection with an antimicrobial drug resistant microorganism in said patient.

7. The method of claim 6, wherein the microorganism is a bacterial microorganism potentially resistant to antimicrobial drug treatment.

8. A method of selecting a treatment of a patient suffering from an infection with a potentially antimicrobial drug resistant microorganism, comprising the steps of:
a) obtaining or providing a sample containing or suspected of containing a microorganism from the patient;
b) determining the presence of at least two genetic variations of the nucleic acid sequences comprising at least one genetic variation in the chromosome and at least one genetic variation in at least one plasmid, as determined by the method of any one of claims 1 to 5, wherein the presence of said at least two genetic variations of the nucleic acid sequences comprising at least one genetic variation in the chromosome and at least one genetic variation in at least one plasmid is indicative of a resistance to one or more antimicrobial drugs;
c) identifying said at least one or more antimicrobial drugs; and
d) selecting one or more antimicrobial drugs different from the ones identified in step c) and being suitable for the treatment of the infection with the microorganism.

9. The method of one or more of claims 1 to 8, wherein the genetic variation is selected from at least one of structural variations of the nucleic acid sequences comprising at least a change in the nucleic acid sequence comprising more than one base, and single nucleotide polymorphisms (SNPs).

10. The method of one or more of claims 6 to 9, wherein determining the nucleic acid sequence information or the presence of a genetic variation comprises using a next generation sequencing or high throughput sequencing method.

11. Computer program product comprising computer executable instructions which, when executed, perform a method according to any one of claims 1 to 10.
